(19) United States
(12) Patent Application Publication
(10) Pub. No.: US 2023/0220039 A1
(43) Pub. Date: Jul. 13, 2023

(54) PD-L1 VARIANT IMMUNOMODULATORY PROTEINS AND USES THEREOF

(71) Applicant: Alpine Immune Sciences, Inc., Seattle, WA (US)

(72) Inventors: Ryan SWANSON, Seattle, WA (US); Michael KORNACKER, Seattle, WA (US); Mark F. MAURER, Seattle, WA (US); Dan ARDOUREL, Seattle, WA (US); Daniel William DEMONTE, Seattle, WA (US); Joseph L. KUJIPER, Kenmore, WA (US)

(73) Assignee: Alpine Immune Sciences, Inc., Seattle, WA (US)

(21) Appl. No.: 16/493,752

(22) PCT Filed: Mar. 13, 2018
(86) PCT No.: PCT/US2018/022265

§ 371 Date: Sep. 12, 2019

Related U.S. Application Data
(60) Provisional application No. 62/472,554, filed on Mar. 16, 2017.
(60) Provisional application No. 62/475,076, filed on Mar. 22, 2017.
(60) Provisional application No. 62/537,923, filed on Jul. 27, 2017.
(60) Provisional application No. 62/582,249, filed on Nov. 6, 2017.

(51) Int. Cl. C07K 14/705

(52) U.S. Cl. CPC C07K 14/70503; C07K 2319/30; C07K 2319/03; C07K 2319/32; C07K 2319/74

(57) ABSTRACT

Provided herein are immunomodulatory proteins comprising variant PD-L1 and nucleic acids encoding such proteins. The immunomodulatory proteins provide therapeutic utility for a variety of immunological and oncological conditions. Compositions and methods for making and using such proteins are provided.

### CROSS-REFERENCE TO RELATED APPLICATIONS

[0001] This application claims priority from U.S. provisional application No. 62/472,554 filed Mar. 16, 2017, entitled “PD-L1 Variant Immunomodulatory Proteins and Uses Thereof,” U.S. provisional application No. 62/475,076 filed Mar. 22, 2017, entitled “PD-L1 Ligand Variant Immunomodulatory Proteins and Uses Thereof,” U.S. provisional application No. 62/537,923 filed Jul. 27, 2017, entitled “PD-L1 Ligand Variant Immunomodulatory Proteins and Uses Thereof,” and U.S. provisional application No. 62/582,249 filed Nov. 6, 2017, entitled “PD-L1 Ligand Variant Immunomodulatory Proteins and Uses Thereof,” the contents of each of which are incorporated by reference in their entirety.

### INCORPORATION BY REFERENCE OF SEQUENCE LISTING

[0002] The present application is being filed along with a Sequence Listing in electronic format. The Sequence Listing is provided as a file entitled 761612001040SeqList.TXT, created Feb. 24, 2018 which is 3,329,416 bytes in size. The information in the electronic format of the Sequence Listing is incorporated by reference in its entirety.

### FIELD

[0003] The present disclosure relates to therapeutic compositions for modulating immune response in the treatment of cancer and immunological diseases. In some aspects, the present disclosure relates to particular variants of PD-L1 that exhibit improved binding, such as improved binding affinity or selectivity, for one or more of the cognate binding partner proteins PD-1 and CD80.

### BACKGROUND

[0004] Modulation of the immune response by intervening in the processes that occur in the immunological synapse (IS) formed by and between antigen-presenting cells (APCs) or target cells and lymphocytes is of increasing medical interest. Mechanistically, cell surface proteins in the IS can involve the coordinated and often simultaneous interaction of multiple protein targets with a single protein to which they bind. IS interactions occur in close association with the junction of two cells, and a single protein in this structure can interact with both a protein on the same cell (cis) as well as a protein on the associated cell (trans), likely at the same time. Although therapeutics are known that can modulate the IS, improved therapeutics are needed. Provided are immunomodulatory proteins, including soluble proteins or transmembrane immunomodulatory proteins capable of being expressed on cells, that meet such needs.

### SUMMARY

[0005] Provided herein is a variant PD-L1 polypeptide, containing an IgV domain or a specific binding fragment thereof, an IgC domain or a specific binding fragment thereof, or both, wherein the variant PD-L1 polypeptide contains one or more amino acid modifications in an unmodified PD-L1 or a specific binding fragment thereof corresponding to position(s) selected from 6, 10, 11, 14, 15, 16, 17, 18, 19, 20, 22, 23, 26, 27, 28, 33, 35, 36, 40, 41, 43, 44, 45, 46, 47, 49, 50, 51, 52, 53, 54, 55, 56, 57, 58, 60, 64, 65, 68, 71, 72, 73, 74, 75, 78, 79, 83, 85, 87, 89, 90, 93, 97, 98, 99, 101, 102, 103, 104, 106, 110, 111, 112, 113, 117, 119, 120, 121, 124, 129, 130, 131, 134, 137, 138, 144, 148, 149, 150, 155, 158, 160, 163, 165, 167, 170, 171, 173, 175, 176, 177, 179, 180, 183, 185, 188, 189, 192, 193, 194, 195, 196, 197, 198, 199, 200, 201, 202, 203, 204, 206, 207, 213, or 221, with reference to the numbering of SEQ ID NO:30 or 1728. In some cases, the amino acid modification is an amino acid substitution, insertion or deletion.

[0006] In some embodiments, the unmodified PD-L1 is a mammalian PD-L1 or a specific binding fragment thereof. In some embodiments, the unmodified PD-L1 is a human PD-L1 or a specific binding fragment thereof. In some of any such embodiments, the unmodified PD-L1 contains (i) the sequence of amino acids set forth in SEQ ID NO:30 or 1728, (ii) a sequence of amino acids that has at least 95% sequence identity to SEQ ID NO:30 or 1728; or (iii) a portion thereof including an IgV domain or IgC domain or specific binding fragments thereof or both.

[0007] In some of any such embodiments, the specific binding fragment of the IgV domain or IgC domain has a length of at least 50, 60, 70, 80, 90, 100, 110 or more amino acids; or the specific binding fragment of the IgV domain contains a length that is at least 80% of the length of the IgV domain set for as amino acids 24-130 of SEQ ID NO:3 and/or the specific binding fragment of the IgC domain contains a length that is at least 80% of the length of the IgC domain set forth as amino acids 133-225 of SEQ ID NO:3. In some of any such embodiments, the variant PD-L1 contains up to 1, 2, 3, 4, 5, 6, 7, 8, 9, 10, 11, 12, 13, 14, 15, 16, 17, 18, 19 or 20 amino acid modifications, optionally amino acid substitutions, insertions and/or deletions. In some of any such embodiments, the variant PD-L1 polypeptide contains a sequence of amino acids that exhibits at least 85%, 86%, 87%, 88%, 89%, 90%, 91%, 92%, 93%, 94%, 95%, 96%, 97%, 98% or 99% sequence identity to SEQ ID NO:30, 1728, or a specific binding fragment thereof.

[0008] In some of any such embodiments, the variant PD-L1 polypeptide exhibits altered binding to the ectodomain of PD-1 compared to the binding of the unmodified PD-L1 to the ectodomain of PD-1. In some embodiments, the variant PD-L1 polypeptide exhibits altered binding to the ectodomain of CD80 compared to the binding of the unmodified PD-L1 to the ectodomain of CD80. In some of any such embodiments, the variant PD-L1 polypeptide exhibits altered binding to the ectodomain of PD-1 compared to the unmodified PD-L1. In some embodiments, the altered binding is altered binding affinity and/or altered binding selectivity.

[0009] In some of any such embodiments, the one or more amino acid modifications are selected from P6S, Y10F, V11A, V11E, Y14S, G15A, S16G, N17D, M18I, M18T, M18V, T19A, T19I, I20L, C22R, K23E, K23N, K23R, E26A, E27D, E27G, K28E, K28I, K28N, K28R, A33D, L35P, I36S, I36T, E40G, M41K, M41V, D43G, D43V, K44E, N45D, N45I, N45T, I46V, I47T, F49S, V50A, H51N, H51R, H51Y, G52R, G52V, E53G, E53V, E54G, D55G, D55N, D55S, D55V, L56Q, K57E, K57R, V58A, V58D, H60R, R64S, Q65L, R68L, K71E, D72G, Q73R, L74P, S75P, N78I, N78S, A79T, I83T, D85E, Q89R, D90G, V93E, M97I, M97K, M97L, I98L, I98T, I98V, S99G, G101D, G101G-ins (G101GG), G102D, A103V, D104G, K106E, K106R, V110M, K111E, K111T, V112A, N113Y, N117S, I119T, N120S, Q121L, L124S, V129A, V129D, T130A, S131F, E134G, C137R, Q138R, K144E, K144Q, I148V, W149R, T150A, Q155H, S158G, K160M, T163I, K163N, N165Y, K167R, K167T, E170G, K171R, F173I, F173L, K173Y, V175A, S177C, L179P, R180S, T183A, T183I, T185A, I188V, F189L, F189S, T192S, F193S, R194G, R194W, R195G, R195S, R195T, L196S, D197G, P198S, P198T, E199G, E200K, E200N, N201D, N201Y, H202Q, T203A, A204T, L206F, V207A, L213P, T221L or a conservative amino acid substitution thereof. In some of any such embodiments, the one or more amino acid modifications are selected from among K28N/M41V/N45T/H51N/K57E, I20L/I36T/N45D/I47T, I20L/M41K/K44E, P6S/N45T/N78I/I83T, N78I, M41K/N78I, N45T/N78I, I20L/N45T, N45T, M41K, I20L/I36T/N45D, N17D/N47T/V50A/D72G, I20L/F49S, N45T/V50A, I20L/N45T/N78I, I20L/N45T/V50A, M41V/N45T, M41K/N45T, A33D/S75P/D85E, M18I/M41K/D43G/H51R/N78I, V11E/I20L/I36T/N45D/H60R/S75P, A33D/V50A, S16G/A33D/K71E/S75P, E27G/N45T/M97I, E27G/N45T/K57R, A33D/E53V, D43G/N45D/V58A, E40G/D43V/N45T/V50A, Y14S/K28E/N45T, A33D/N78S, A33D/N78I, A33D/N45T, A33D/N45T/N78I, E27G/N45T/V50A, N45T/V50A/N78S, I20L/N45T/V110M, I20L/I36T/N45T/V50A, N45T/L74P/S75P, N45T/S75P, S75P/K106R, S75P, A33D/S75P, A33D/S75P/D104G, A33D/S75P, I20L/E27G/N45T/V50A, I20L/E27G/D43G/N45D/V58A/N78I, I20L/D43G/N45D/V58A/N78I, I20L/A33D/D43G/N45D/V58A/N78I, I20L/D43G/N45D/N78I, E27G/N45T/V50A/N78I, N45T/V50A/N78I, V11A/I20L/E27G/D43G/N45D/H51Y/S99G, I20L/E27G/D43G/N45T/V50A, I20L/K28E/D43G/N45D/V58A/Q89R, I20L/I36T/N45D, I20L/K28E/D43G/N45D/E53G/V58A/N78I, A33D/D43G/N45D/V58A/S75P, K23R/D43G/N45D, I20L/D43G/N45D/V58A/N78I/D90G/G101D, D43G/N45D/L56Q/V58A/G101G-ins (G101GG), I20L/K23E/D43G/N45D/V58A/N78I, I20L/K23E/D43G/N45D/V50A/N78I, T19I/E27G/N45I/V50A/N78I/M97K, I20L/M41K/D43G/N45D, K23R/N45T/N78I, I20L/K28E/D43G/N45D/V58A/Q89R/G101G-ins (G101GG), K57R/S99G, K57R/S99G/F189L, M18V/M97L/F193S/R195G/E200K/H202Q, I36S/M41K/M97L/K144Q/R195G/E200K/H202Q/L206F, C22R/Q65L/L124S/K144Q/R195G/E200N/H202Q/T221L, M18V/I98L/L124S/P198T/L206F, S99G/N117S/I148V/K171R/R180S, I36T/M97L/A103V/Q155H, K28I/S99G, R195S, A79T/S99G/T185A/R195G/E200K/H202Q/L206F, K57R/S99G/L124S/K144Q, K57R/S99G/R195G, D55V/M97L/S99G, E27G/I36T/D55N/M97L/K111E, E54G/M97L/S99G, G15A/I36T/M97L/K111E/H202Q, G15A/I36T/V129D, G15A/I36T/V129D/R195G, G15A/V129D, I36S/M97L, I36T/D55N/M97L/K111E/A204T, I36T/D55N/M97L/K111E/V129A/F173L, I36T/D55S/M97L/K111E/I148V/R180S, I36T/G52R/M97L/V112A/K144E/V175A/P198T, I36T/I46V/D55G/M97L/K106E/K144E/T185A/R195G, I36T/I83T/M97L/K144E/P198T, I36T/M97L/K111E, I36T/M97L/K144E/P198T, I36T/M97L/Q155H/F193S/N201Y, I36T/M97L/V129D, L35P/I36S/M97L/K111E, M18I/I36T/E53G/M97L/K144E/E199G/V207A, M18T/I36T/D55N/M97L/K111E, M18V/M97L/T176N/R195G, M97L/S99G, N17D/M97L/S99G, S99G/T185A/R195G/P198T, V129D/H202Q, V129D/P198T, V129D/T150A, V93E/V129D, Y10F/M18V/S99G/Q138R/T203A, N45D, K160M/R195G, N45D/K144E, N45D/P198S, N45D/P198T, N45D/R195G, N45D/R195S, N45D/S131F, N45D/V58D, V129D/R195S, I98T/F173Y/L196S, N45D/E134G/L213P, N45D/F173I/S177C, N45D/I148V/R195G, N45D/K111T/R195G, N45D/N113Y/R195S, N45D/N165Y/E170G, N45D/Q89R/I98V, N45D/S131F/P198S, N45D/S75P/P198S, N45D/V50A/R195T, E27D/N45D/T183A/I188V, F173Y/T183I/L196S/T203A, K23N/N45D/S75P/N120S, N45D/G102D/R194W/R195G, N45D/G52V/Q121L/P198S, N45D/I148V/R195G/N201D, N45D/K111T/T183A/I188V, N45D/Q89R/F189S/P198S, N45D/S99G/C137R/V207A, N45D/T163I/K167R/R195G, N45D/T183A/T192S/R194G, N45D/V50A/I119T/K144E, T19A/N45D/K144E/R195G, V11E/N45D/T130A/P198T, V26A/N45D/T163I/T185A, K23N/N45D/L124S/K167T/R195G, K23N/N45D/Q73R/T163I, K28E/N45D/W149R/S158G/P198T, K28R/N45D/K57E/I98V/R195S, K28R/N45D/V129D/T163N/R195T, M41K/D43G/N45D/R64S/R195G, M41K/D43G/N45D/R64S/S99G, N45D/R68L/F173L/D197G/P198S, N45D/V50A/I148V/R195G/N201D, M41K/D43G/K44E/N45D/R195G/N201D, or N45D/V50A/L124S/K144E/L179P/R195G.

[0010] In some of any such embodiments, the one or more amino acid modifications correspond to position(s) selected from 20, 27, 28, 33, 36, 41, 43, 45, 50, 58, 71, 75 or 78. In some embodiments, the one or more amino acid substitutions are selected from I20L,E27G, K28E, A33D, I36T, M41K, D43G, N45D, N45T, V50A, V58A, K71E, S75P, N78I, or a conservative amino acid substitution thereof.

[0011] In some of any such embodiments, the one or more amino acid modifications correspond to position(s) selected from 20, 27, 33, 36, 43, 45, 50, 58, 75, 78, 97, 99, or 195. In some embodiments, the one or more amino acid substitutions are selected from I20L,E27G, A33D, I36T, D43G, N45D, N45T, V50A, V58A, S75P, N78I, or a conservative amino acid substitution thereof. In some embodiments, the variant PD-L1 polypeptide contains amino acid modifications I20L/I36T, I20L/D43G, I20L/N45D, I20L/N45T, I20L/N45T, I20L/V50A, I20L/V58A, I20L/S75P, I20L/N78I, I36T/D43G, I36T/N45D, I36T/N45T, I36T/V50A, I36T/V58A, I36T/S75P, I36T/N78I, D43G/N45D, D43G/N45T, D43G/V50A, D43G/V58A, D43G/S75P, D43G/N78I, N45D/V50A, N45D/V58A, N45D/S75P, N45D/N78I, N45T/V50A, N45T/V58A, N45T/S75P, N45T/N78I, V50A/V58A, V50A/S75P, V50A/N78I, V58A/S75P, V58A/N78I, or S75P/N78I. In some particular embodiments, the variant PD-L1 polypeptide contains amino acid modifications D43G/N45D/V58A. In some aspects, the variant PD-L1 polypeptide contains amino acid modifications D43G/N45D/L56Q/V58A/G101G-ins (G101GG) or I20L/K28E/D43G/N45D/V58A/Q89R/G101G-ins (G101GG).

[0012] In some of any such embodiments, the variant PD-L1 polypeptide contains the variant PD-L1 polypeptide comprises or consists of the PD-L1 extracellular domain (ECD); and/or the variant PD-L1 polypeptide comprises or consists of the IgV domain or a specific fragment thereof and the IgC domain or a specific fragment thereof. In some of any such embodiments, the variant PD-L1 polypeptide includes the sequence of amino acids set forth in any of SEQ ID NOS: 56-120, 1725, 1729-1818, 1819-1907, 1943-2008 or a specific binding fragment thereof, or a sequence of amino acids that exhibits at least 95% sequence identity to any of SEQ ID NOS: 56-120, 1725, 1729-1818, 1819-1907, 1943-2008 or a specific binding fragment thereof and that contains the one or more of the amino acid substitutions.

[0013] In some of any such embodiments, the variant PD-L1 polypeptide contains the IgV domain or a specific binding fragment thereof. In some of any such embodiments, the IgV domain or specific binding fragment thereof is the only PD-L1 portion of the variant PD-L1 polypeptide. In some embodiments, the IgC domain or specific binding fragment thereof is the only PD-L1 portion of the variant PD-L1 polypeptide.

[0014] In some of any such embodiments, the variant PD-L1 polypeptide contains the sequence of amino acids set forth in any of SEQ ID NOS: 121-185, 244-308, 1726-1727, 1908-1937 or a specific binding fragment thereof, a sequence of amino acids that exhibits at least 95% sequence identity to any of SEQ ID NOS: 121-185, 244-308, 1726-1727, 1908-1937 or a specific binding fragment thereof and that contains the one or more of the amino acid substitutions. In some embodiments, the IgC domain or specific binding fragment thereof is the only PD-L1 portion of the variant PD-L1 polypeptide.

[0015] In some of any such embodiments, the variant PD-L1 polypeptide specifically binds to the ectodomain of PD-1 or CD80 with increased affinity compared to the binding of the unmodified PD-L1 to the same ectodomain of PD-1 or CD80. In some of any such embodiments, the variant PD-L1 polypeptide specifically binds to the ectodomain of PD-1 with increased affinity compared to the binding of the unmodified PD-L1 to the ectodomain of PD-1. In some of any such embodiments, the variant PD-L1 polypeptide specifically binds to the ectodomain of PD-1 and the ectodomain of CD80 each with increased affinity compared to the binding of the unmodified PD-L1 to the same ectodomains. In some of any such embodiments, the variant PD-L1 polypeptide specifically binds to the ectodomain of PD-1 with increased affinity and specifically binds to the ectodomain of CD80 with decreased affinity compared to the binding of the unmodified PD-L1 to the same ectodomains.

[0016] In some of any such embodiments, the increased affinity to the ectodomain of PD-1 is increased more than 1.2-fold, 1.5-fold, 2-fold, 3-fold, 4-fold, 5-fold, 6-fold, 7-fold, 8-fold, 9-fold, 10-fold, 20-fold, 30-fold, 40-fold, 50-fold or 60-fold compared to the unmodified PD-L1. In some aspects, the increased affinity to the ectodomain of CD80 is increased more than 1.2-fold, 1.5-fold, 2-fold, 3-fold, 4-fold, 5-fold, 6-fold, 7-fold, 8-fold, 9-fold, 10-fold, 20-fold, 30-fold, 40-fold, 50-fold or 60-fold compared to the unmodified PD-L1. In some cases, the decreased affinity to the ectodomain of CD80 is decreased more than 1.2-fold, 1.5-fold, 2-fold, 3-fold, 4-fold, 5-fold, 6-fold, 7-fold, 8-fold, 9-fold, 10-fold, 20-fold, 30-fold, 40-fold, 50-fold or 60-fold compared to the unmodified PD-L1.

[0017] In some of any such embodiments, the variant polypeptide specifically binds to the ectodomain of PD-1 with increased selectivity compared to the unmodified PD-L1. In some instances, the increased selectivity comprises a greater ratio of binding of the variant polypeptide for PD-1 versus CD80 compared to the ratio of binding of the unmodified PD-L1 polypeptide for the same ectodomains of PD-1 versus CD80. In some examples, the ratio is greater by at least or at least about 1.5-fold, 2.0-fold, 3.0-fold, 4.0-fold, 5-fold, 10-fold, 15-fold, 20-fold, 30-fold, 40-fold, 50-fold or more.

[0018] In some of any such embodiments, the PD-1 is a human PD-1. In some of any such embodiments, the CD80 is a human CD80.

[0019] In some of any such embodiments, the binding activity is altered (increased or decreased) more than 1.2-fold, 1.5-fold, 2-fold, 3-fold, 4-fold, 5-fold, 6-fold, 7-fold, 8-fold, 9-fold, 10-fold, 20-fold, 30-fold 40-fold or 50-fold compared to the unmodified PD-L1.

[0020] In some of any such embodiments, the variant PD-L1 polypeptide is a soluble protein. In some of any such embodiments, the variant PD-L1 polypeptide lacks the PD-L1 transmembrane domain and intracellular signaling domain; and/or the variant PD-L1 polypeptide is not capable of being expressed on the surface of a cell. In some of any such embodiments, the variant PD-L1 polypeptide is linked to a multimerization domain. In some of any such embodiments, the variant PD-L1 polypeptide is a multimeric polypeptide, optionally a dimeric polypeptide, comprising a first variant PD-L1 polypeptide linked to a multimerization domain and a second variant PD-L1 polypeptide linked to a multimerization domain. In some embodiments, the first variant PD-L1 polypeptide and the second variant PD-L1 polypeptide are the same or different.

[0021] In some of any such embodiments, the multimerization domain is an Fc domain or a variant thereof with reduced effector function. In some of any such embodiments, the variant PD-L1 polypeptide is linked to a moiety that increases biological half-life of the polypeptide. In some of any such embodiments, the variant PD-L1 polypeptide is linked to an Fc domain or a variant thereof with reduced effector function.

[0022] In some of any such embodiments, the Fc domain is mammalian, optionally human; or the variant Fc domain comprises one or more amino acid modifications compared to an unmodified Fc domain that is mammalian, optionally human. In some of any such embodiments, the Fc domain or variant thereof contains the sequence of amino acids set forth in SEQ ID NO:187 or SEQ ID NO:188 or a sequence of amino acids that exhibits at least 85% sequence identity to SEQ ID NO:187 or SEQ ID NO:188. In some embodiments, the Fc domain comprises one or more amino acid modifications selected from among E233P, L234A, L234V, L235A, L235E, G236del, G237A, S267K, N297G, R292C, V302C, and K447del, each by EU numbering. In some embodiments, the Fc domain comprises the amino acid modification C220S by EU numbering. In some of any such embodiments, the Fc domain comprises the sequence of amino acids set forth in any of SEQ ID NOS: 1155, 1157, 1158, 1159, 1715, 1938, 1939, and 1940 or a sequence of amino acids that exhibits at least 85% sequence identity to any of SEQ ID NOS:1155, 1157, 1158, 1159, 1715, 1938, 1939, and 1940 and exhibits reduced effector function.

[0023] In some of any such embodiments, the variant PD-L1 polypeptide is linked indirectly via a linker, optionally a G4S linker. In some of any such embodiments, the variant PD-L1 polypeptide is a transmembrane immunomodulatory protein further containing a transmembrane domain linked to the extracellular domain (ECD) or specific binding fragment thereof of the variant PD-L1 polypeptide.

[0024] In some of any such embodiments, the transmembrane domain contains the sequence of amino acids set forth as residues 239-259 of SEQ ID NO:3 or a functional variant thereof that exhibits at least 85% sequence identity to residues 239-259 of SEQ ID NO:3. In some embodiments, the variant PD-L1 polypeptide further contains a cytoplasmic signaling domain linked to the transmembrane domain. In some instances, the cytoplasmic signaling domain contains the sequence of amino acids set forth as residues 260-290 of SEQ ID NO:3 or a functional variant thereof that exhibits at least 85% sequence identity to residues 260-290 of SEQ ID NO:3.

[0025] In some of any of the provided embodiments, the variant PD-L1 polypeptide modulates a response of an immune cell, such as a T cell. In some embodiments, the response, e.g. T cell response, is increased or is decreased. In some of any such embodiments, the variant PD-L1 increases IFN-gamma (interferon-gamma) expression relative to the unmodified PD-L1 in an in vitro T-cell assay. In some of any such embodiments, the variant PD-L1 decreases IFN-gamma (interferon-gamma) expression relative to the unmodified PD-L1 in an in vitro T-cell assay.

[0026] In some of any such embodiments, the variant PD-L1 polypeptide is deglycosylated.

[0027] In some embodiments of any one of the variant PD-L1 polypeptides described herein, the variant PD-L1 polypeptide increases T cell signaling relative to the unmodified PD-L1, such as determined using a reporter assay involving a T cell (e.g. Jurkat) engineered with a reporter (e.g. luciferase) operably connected to an IL-2 promoter. In some embodiments of any one of the variant PD-L1 polypeptides described herein, the variant PD-L1 polypeptide decreases T cell signaling relative to the unmodified PD-L1, such as determined using a reporter assay involving a T cell (e.g. Jurkat) engineered with a reporter (e.g. luciferase) operably connected to an IL-2 promoter. In some of any such embodiments, the variant PD-L1 polypeptide is provided in any of a variety of formats, such as soluble or immobilized (e.g. plate-bound).

[0028] Also provided is an immunomodulatory polypeptide containing the variant PD-L1 according to any of the provided embodiments linked, directly or indirectly via a linker, to a second polypeptide comprising an immunoglobulin superfamily (IgSF) domain. In some cases, the IgSF domain is affinity modified and exhibits altered binding to one or more of its cognate binding partner(s) compared to the unmodified or wild-type IgSF domain to the same one or more cognate binding partner(s). In some embodiments, the affinity-modified IgSF domain contains one or more amino acid modifications compared to the unmodified or wild-type IgSF domain of the IgSF family member. In some instances, the IgSF domain exhibits increased binding to one or more of its cognate binding partner(s) compared to the unmodified or wild-type IgSF domain of the IgSF family member to the same one or more cognate binding partner(s). In some examples, the IgSF domain is affinity modified and exhibits altered binding to one or more of its cognate binding partner(s) compared to the binding of the unmodified or wild-type IgSF domain of the IgSF family member to the same one or more cognate binding partner(s). In some embodiments, the variant PD-L1 is a first PD-L1 variant and the IgSF domain of the second polypeptide is an IgSF domain from a second variant PD-L1 wherein the first and second PD-L1 variant are the same or different.

[0029] In some embodiments, the variant PD-L1 polypeptide is capable of specifically binding to PD-1 or CD80 and the IgSF domain of the second polypeptide is capable of binding to a cognate binding partner other than one specifically bound by the PD-L1 variant polypeptide. In some embodiments, the IgSF domain is from a member of the B7 family. In some cases, the IgSF domain is a tumor-localizing moiety that binds to a ligand expressed on a tumor or to an inflammatory-localizing moiety that binds to a cell or tissue associated with an inflammatory environment. In some embodiments, the IgSF domain is a tumor-localizing moiety that binds to a ligand expressed on a tumor. In some cases, the ligand is B7H6. In some embodiments, the IgSF domain is from NKp30.

[0030] In some embodiments, the IgSF domain or affinity-modified IgSF domain thereof, optionally of the second or third polypeptide, is or contains an IgV domain. In some embodiments, the variant PD-L1 polypeptide is or contains an IgV domain. In some embodiments, the immunomodulatory protein comprises a multimerization domain linked to one or both of the variant PD-L1 polypeptide of the IgSF domain. In some instances, the multimerization domain is an Fc domain or a variant thereof with reduced effector function. In some embodiments, the immunomodulatory protein is dimeric. In some embodiments, the immunomodulatory protein is homodimeric. In some embodiments, the immunomodulatory protein is heterodimeric.

[0031] In some of any such embodiments, the IgSF domain of the second polypeptide is an IgSF domain of a ligand that binds to an inhibitory receptor, or is an affinity-modified IgSF domain thereof. In some instances, the affinity-modified IgSF domain exhibits increased binding affinity and/or binding selectivity for the inhibitory receptor compared to binding of the unmodified IgSF domain to the same inhibitory receptor. In some embodiments, the inhibitory receptor is TIGIT, PD-1 or CTLA-4; or the ligand of the inhibitory receptor is PD-L2, CD155, CD112 or CD80.

[0032] In some of any such embodiments, the IgSF domain of the second polypeptide is an affinity-modified IgSF domain comprising: (i) a wildtype CD155 comprising an IgSF set forth in any of SEQ ID NOS: 47, 310, or 353, or a variant CD155 polypeptide comprising an IgSF domain of any of SEQ ID NOS set forth in Table 5, optionally any of the SEQ ID NOs: 311-352, 354-665, 1505-1576, 1551-1714; (ii) a wildtype CD112 comprising an IgSF domain set forth in any of SEQ ID NOS: 48, 666, or 761, or a variant CD112 polypeptide comprising an IgSF domain of any of SEQ ID NOS set forth in Table 4, optionally any of the SEQ ID NOs: 667-760, 762-931, 1433-1504; (iii) a wildtype CD80 comprising an IgSF domain set forth in any of SEQ ID NOS: 28, 1005, or 2030, or a variant CD80 polypeptide comprising an IgSF of any of SEQ ID NOS: set forth in Table 3, optionally any of the SEQ ID NOs: 932-964, 966-1038, 1040-1078, 1080-1112, 1114-1152; (iv) a wildtype PD-L2 comprising an IgSF domain set forth in any of SEQ ID NOS: 31, 1203, or 1263, or a variant PD-L2 polypeptide comprising an IgSF domain of any of SEQ ID NOS set forth in Table 3, optionally any of the SEQ ID NOs: 1204-1254, 1256-1331, 1333-1407, 1409-1432; (v) a sequence of amino acids that exhibits at least 95% sequence identity to any of the SEQ ID NOSs in (i)-(iv) and that comprises the amino acid substitution; or (vi) a specific binding fragment of any of (i)-(v).

[0033] In some embodiments, the immunomodulatory protein further contains a third polypeptide comprising an IgSF domain of an IgSF family member or an affinity-modified IgSF domain thereof, said affinity-modified IgSF domain comprising one or more amino acid modifications compared to the unmodified or wild-type IgSF domain of the IgSF family member. In some cases, the third polypeptide is the same as the first and/or second polypeptide or the third polypeptide is different from the first and/or second polypeptide. In some examples, the third polypeptide is selected from (i) a wildtype CD155 comprising an IgSF set forth in any of SEQ ID NOS: 47, 310, or 353, or a variant CD155 polypeptide comprising an IgSF domain set forth in any of SEQ ID NOS:311-352, 354-665, 1505-1576, 1551-1714; (ii) a wildtype CD112 comprising an IgSF domain set forth in any of SEQ ID NOS: 48, 666, or 761, or a variant CD112 polypeptide comprising an IgSF domain set forth in any of SEQ ID NOS: 667-760, 762-931, 1433-1504; (iii) a wildtype CD80 comprising an IgSF domain set forth in any of SEQ ID NOS: 28, 1005, or 2030, or a variant CD80 polypeptide comprising an IgSF domain set forth in any of SEQ ID NOS: 932-964, 966-1038, 1040-1078, 1080-1112, 1114-1152; (iv) a wildtype PD-L2 comprising an IgSF domain set forth in any of SEQ ID NOS: 31, 1203, or 1263, or a variant PD-L2 polypeptide comprising an IgSF domain set forth in any of SEQ ID NOS: 1204-1254, 1256-1331, 1333-1407, 1409-1432; (v) a sequence of amino acids that exhibits at least 95% sequence identity to any of the SEQ ID NOSs in (i)-(iv) and that comprises the amino acid substitution; or (vi) a specific binding fragment of any of (i)-(v). In some instances, the IgSF domain or affinity-modified IgSF domain thereof, optionally of the second or third polypeptide, is or contains an IgV domain. In some cases, the variant PD-L1 polypeptide is or contains an IgV domain.

[0034] In some embodiments, the immunomodulatory protein further contains at least one additional polypeptide comprising an IgSF domain of an IgSF family member or an affinity-modified IgSF domain thereof, said affinity-modified IgSF domain comprising one or more amino acid modifications compared to the unmodified or wild-type IgSF domain of the IgSF family member. In some embodiments, the immunomodulatory protein further contains a multimerization domain linked to at least one of the variant PD-L1 polypeptide, or the second polypeptide. In some aspects, the immunomodulatory protein further contains a multimerization domain linked to at least one of the variant PD-L1 polypeptide, the second polypeptide and/or the third polypeptide. In some cases, the multimerization domain is an Fc domain or a variant thereof with reduced effector function. In some embodiments, the multimerization domain promotes heterodimer formation.

[0035] Provided is an immunomodulatory protein containing a first variant PD-L1 polypeptide in which the multimerization domain is a first multimerization domain and a second variant PD-L1 polypeptide in which the multimerization domain is a second multimerization domain, wherein the first and second multimerization domains interact to form a multimer containing the first and second variant PD-L1 polypeptide, optionally wherein the first and second variant PD-L1 polypeptide are the same. In some cases, the multimerization domain is a first multimerization domain and interacts with a second multimerization domain to form a multimer comprising the immunomodulatory protein. In some examples, the immunomodulatory protein is a first immunomodulatory protein and a second immunomodulatory protein is linked directly or indirectly via a linker to the second multimerization domain, wherein the multimer comprises the first and second immunomodulatory protein. In some embodiments, the second immunomodulatory protein is any of the immunomodulatory proteins described and the multimerization domain is the second multimerization domain. In some cases, the multimer is dimer. In some embodiments, the second polypeptide is a variant CD155 polypeptide and the first and/or second immunomodulatory protein includes the sequence set forth in any of SEQ ID NOS: 1716-1721, or a sequence of amino acids that exhibits at least 85%, 86%, 87%, 88%, 89%, 90%, 91%, 92%, 93%, 94%, 95%, 96%, 97%, 98% or 99% sequence identity to any of SEQ ID NOS: 1716-1721; or the second polypeptide is CD112 or CD155 and the third polypeptide is the other of CD112 or CD155 and the first and/or second immunomodulatory portion comprise the sequence set forth in any of SEQ ID NOS: 1722-1724, or a sequence of amino acids that exhibits at least 85%, 86%, 87%, 88%, 89%, 90%, 91%, 92%, 93%, 94%, 95%, 96%, 97%, 98% or 99% sequence identity to any of SEQ ID NOS: 1716-1721.

[0036] In some cases, the immunomodulatory protein is a homodimer. In some aspects, the immunomodulatory protein is a heterodimer, optionally wherein the first and second multimerization domain are different and/or are capable of interacting to mediate heterodimer formation. In some embodiments, the first and/or second multimerization domain is an Fc domain or a variant thereof with reduced effector function, optionally wherein the Fc domain is of an immunoglobulin protein that is human and/or the Fc region is human, optionally wherein the Fc region is of an immunoglobulin G1 (IgG1) or an immunoglobulin G2 (IgG2), optionally set forth in SEQ ID NO:187 or SEQ ID NO:188, optionally wherein the Fc region exhibits one or more effector functions; or the variant Fc domain comprises one or more amino acid substitutions in a wildtype Fc region, optionally wherein the reduced effector function is reduced compared to a wildtype Fc region, optionally wherein the wildtype human Fc is of human IgG1. In some cases, the the first and second multimerization domain is the same or different.

[0037] In some embodiments, the variant Fc region contains the amino acid substitutions E233P, L234A, L234V, L235A, L235E, G236del, G237A, S267K, or N297G, with residue numbering according to the EU index of Kabat; or the amino acid substitutions R292C/N297G/V302C or L234A/L235E/G237A, with residue numbering according to the EU index of Kabat. In some examples, the Fc region or variant Fc region contains the amino acid substitution C220S, with residue numbering according to the EU index of Kabat. In some cases, the Fc region or variant Fc region contains K447del, with residue numbering according to the EU index of Kabat.

[0038] Also provided is a conjugate containing a variant PD-L1 according to any of the provided embodiments, or an immunomodulatory polypeptide according to any of the provided embodiments linked to a moiety. In some instances, the moiety is a targeting moiety that specifically binds to a molecule on the surface of a cell. In some aspects, the targeting moiety specifically binds to a molecule on the surface of an immune cell.

[0039] In some embodiments, the immune cell is an antigen presenting cell or a lymphocyte. In some cases, the targeting moiety is a tumor-localizing moiety that binds to a molecule on the surface of a tumor. In some examples, the moiety is a protein, a peptide, nucleic acid, small molecule or nanoparticle. In some embodiments, the moiety is an antibody or antigen-binding fragment. In some of any such embodiments, the conjugate is divalent, tetravalent, hexavalent or octavalent. In some aspects, the conjugate is a fusion protein

[0040] Also provided is a nucleic acid molecule, encoding a variant PD-L1 polypeptide according to any of the provided embodiments, or an immunomodulatory polypeptide or conjugate that is a fusion protein according to any of the provided embodiments. In some embodiments, the nucleic acid molecule is synthetic nucleic acid. In some embodiments, the nucleic acid molecule is cDNA.

[0041] Also provided is a vector containing the nucleic acid molecule according to any of the provided embodiments. In some cases, the vector is an expression vector. In some aspects, the vector is a mammalian expression vector or a viral vector.

[0042] Also provided is a cell, comprising the vector according to any of the provided embodiments. In some instances, the cell is a mammalian cell. In some aspects, the cell is a human cell.

[0043] Also provided is a method of producing a variant PD-L1 polypeptide or an immunomodulatory protein, comprising introducing the nucleic acid molecule according to any of the provided embodiments or vector according to any of the provided embodiments into a host cell under conditions to express the protein in the cell. In some instances, the method further includes isolating or purifying the variant PD-L1 polypeptide or immunomodulatory protein from the cell. Also provided is a method of engineering a cell expressing a variant PD-L1 variant polypeptide including introducing a nucleic acid molecule encoding the variant PD-L1 polypeptide according to any of the provided embodiments into a host cell under conditions in which the polypeptide is expressed in the cell.

[0044] Also provided is an engineered cell, expressing the variant PD-L1 polypeptide according to any of the provided embodiments, the immunomodulatory protein according to any of the provided embodiments, the conjugate that is a fusion protein according to any of the provided embodiments, the nucleic acid molecule according to any of the provided embodiments or the vector according to any of the provided embodiments. In some cases, the variant PD-L1 polypeptide or immunomodulatory protein comprises a signal peptide. In some cases, the variant PD-L1 polypeptide or immunomodulatory protein is encoded by a nucleic acid including a sequence of nucleotides encoding comprises a signal peptide. In some embodiments, the variant PD-L1 polypeptide or immunomodulatory protein does not contain a transmembrane domain and/or is not expressed on the surface of the cell.

[0045] In some embodiments of the engineered cell, the variant PD-L1 polypeptide or immunomodulatory protein is secreted or capable of being secreted from the engineered cell. In some embodiments, the engineered cell contains a variant PD-L1 polypeptide that contains a transmembrane domain and/or is the transmembrane immunomodulatory protein according to any of the provided embodiments. In some embodiments, the variant PD-L1 polypeptide is expressed on the surface of the cell.

[0046] In some embodiments of the engineered cell, the cell is an immune cell. In some instances, the immune cell is an antigen presenting cell (APC) or a lymphocyte. In some embodiments, the cell is a primary cell. In some embodiments, the cell is a mammalian cell. In some embodiments, the cell is a human cell. In some embodiments, the lymphocyte is a T cell. In some embodiments, the APC is an artificial APC. In some examples, the cell is a lymphocyte and the lymphocyte is a T cell. In some aspects, the cell is an APC and the APC is an artificial APC. In some of any such embodiments, the engineered cell further contains a chimeric antigen receptor (CAR) or an engineered T-cell receptor.

[0047] Also provided is an infectious agent, containing a nucleic acid molecule encoding a variant PD-L1 polypeptide according to any of the provided embodiments, a conjugate that is a fusion protein of any of the provided embodiments, or an immunomodulatory polypeptide according to any of the provided embodiments. In some instances, the encoded variant PD-L1 polypeptide or immunomodulatory polypeptide does not contain a transmembrane domain and/or is not expressed on the surface of a cell in which it is expressed. In some embodiments, the encoded variant PD-L1 polypeptide or immunomodulatory polypeptide is secreted or capable of being secreted from a cell in which it is expressed. In some instances, the encoded variant PD-L1 polypeptide contains a transmembrane domain. In some embodiments, the encoded variant PD-L1 polypeptide is expressed on the surface of a cell in which it is expressed.

[0048] In some of any such embodiments, the infectious agent is a bacterium or a virus. In some embodiments, the virus is a lentiviral or retroviral construct or a hybrid thereof. In some aspects, the virus is an oncolytic virus. In some examples, the oncolytic virus is an adenovirus, adeno-associated virus, herpes virus, Herpes Simplex Virus, Vesticular Stomatic virus, Reovirus, Newcastle Disease virus, parvovirus, measles virus, vesticular stomatitis virus (VSV), Coxsackie virus or a Vaccinia virus. In some cases, the virus specifically targets dendritic cells (DCs) and/or is dendritic cell-tropic. In some examples, the virus is a lentiviral vector that is pseudotyped with a modified Sindbis virus envelope product. In some of any such embodiments, the infectious agent further contains a nucleic acid molecule encoding a further gene product that results in death of a target cell or that can augment or boost an immune response. In some examples, the further gene product is selected from an anticancer agent, anti-metastatic agent, an antiangiogenic agent, an immunomodulatory molecule, an immune checkpoint inhibitor, an antibody, a cytokine, a growth factor, an antigen, a cytotoxic gene product, a pro-apoptotic gene product, an anti-apoptotic gene product, a cell matrix degradative gene, genes for tissue regeneration or reprogramming human somatic cells to pluripotency.

[0049] Also provided is a pharmaceutical composition containing the variant PD-L1 polypeptide according to any of the provided embodiments, an immunomodulatory protein according to any of the provided embodiments, a conjugate according to any of the embodiments, an engineered cell according to any of the provided embodiments or an infectious agent according to any of the provided embodiments. In some cases, the pharmaceutical composition contains a pharmaceutically acceptable excipient. In some embodiments, the pharmaceutical composition is sterile.

[0050] Also provided is an article of manufacture containing the pharmaceutical composition according to any of the provided embodiments in a vial. In some cases, the vial is sealed.

[0051] Also provided is a kit containing the pharmaceutical composition according to any of the provided embodiments and instructions for use. Also provided is a kit containing the article of manufacture according to any of the provided embodiments and instructions for use.

[0052] Also provided is a method of modulating an immune response, such as increasing or decreasing an immune response, in a subject, including administering the pharmaceutical composition according to any of the provided embodiments to the subject. In some embodiments, the method of modulating an immune response in a subject, includes administering the engineered cells according to any of the provided embodiments to the subject. In some cases, the engineered cells are autologous to the subject. In some instances, the engineered cells are allogenic to the subject. In some embodiments, the method that modulates the immune response treats a disease or condition in the subject. In some embodiments, the method comprises administering to the subject a soluble variant PD-L1 polypeptide according to any one of the embodiments described herein, an immunomodulatory protein according to any one of the embodiments described herein or a conjugate according to any one of the embodiments described herein. In some embodiments, the method comprises administering to the subject an infectious agent encoding a variant PD-L1 polypeptide according to any one of the embodiments described herein.

[0053] In some of any such embodiments, the immune response is increased. In some embodiments, a variant PD-L1 polypeptide or immunomodulatory protein that is soluble is administered to the subject. In some embodiments, the variant PD-L1 polypeptide or immunomodulatory protein is an Fc fusion protein. In some embodiments, a variant PD-L1 polypeptide or immunomodulatory protein that is soluble, optionally that lacks a PD-L1 transmembrane and intracellular signaling domain, is administered to the subject. In some cases, the soluble immunomodulatory protein is an immunomodulatory Fc fusion protein. In some embodiments, a variant PD-L1 polypeptide according to any of the provided embodiments, the immunomodulatory protein according to any of the provided embodiments, or the conjugate according to any of the provided embodiments is administered to the subject. In some embodiments, an engineered cell containing a secretable variant PD-L1 polypeptide is administered to the subject. In some of any such embodiments, an engineered cell according to any of the provided embodiments is administered to the subject. In some aspects, an infectious agent encoding a variant PD-L1 polypeptide that is a secretable immunomodulatory protein is administered to the subject, optionally under conditions in which the infectious agent infects a tumor cell or immune cell and the secretable immunomodulatory protein is secreted from the infected cell.

[0054] In some embodiment, the disease or condition is a tumor or cancer. In some examples, the disease or condition is selected from melanoma, lung cancer, bladder cancer, a hematological malignancy, liver cancer, brain cancer, renal cancer, breast cancer, pancreatic cancer, colorectal cancer, spleen cancer, prostate cancer, testicular cancer, ovarian cancer, uterine cancer, gastric carcinoma, a musculoskeletal cancer, a head and neck cancer, a gastrointestinal cancer, a germ cell cancer, or an endocrine and neuroendocrine cancer.

[0055] In some of any such embodiments, the immune response is decreased. In some embodiments, an immunomodulatory protein or conjugate containing a variant PD-L1 polypeptide linked to an IgSF domain or a moiety that localizes to a cell or tissue of an inflammatory environment is administered to the subject. In some cases, the binding molecule comprises an antibody or an antigen-binding fragment thereof or contains a wild-type IgSF domain or variant thereof. In some embodiments, the immunomodulatory protein according to any of the provided embodiments or the conjugate according to any of the provided embodiments is administered to the subject.

[0056] In some embodiments, a variant PD-L1 polypeptide that is a transmembrane immunomodulatory protein is administered to the subject. In some embodiments, the engineered cell containing a variant PD-L1 polypeptide that is a transmembrane immunomodulatory protein according to any of the provided embodiments is administered to the subject. In some cases, an infectious agent encoding a variant PD-L1 polypeptide that is a transmembrane immunomodulatory protein is administered to the subject, optionally under conditions in which the infectious agent infects a tumor cell or immune cell and the transmembrane immunomodulatory protein is expressed on the surface of the infected cell.

[0057] In some embodiments, the disease or condition is an inflammatory or autoimmune disease or condition. In some of any such embodiments, the disease or condition is an antineutrophil cytoplasmic antibodies (ANCA)-associated vasculitis, a vasculitis, an autoimmune skin disease, transplantation, a Rheumatic disease, an inflammatory gastrointestinal disease, an inflammatory eye disease, an inflammatory neurological disease, an inflammatory pulmonary disease, an inflammatory endocrine disease, or an autoimmune hematological disease. In some examples, the disease or condition is selected from inflammatory bowel disease, transplant, Crohn's disease, ulcerative colitis, multiple sclerosis, asthma, rheumatoid arthritis, or psoriasis. In some of any such embodiments, the variant PD-L1 is administered in a format that decreases an immune response in the subject.

### BRIEF DESCRIPTION OF THE DRAWINGS

[0058] FIG. 1A-1C depicts various formats of the provided variant IgSF domain molecules. FIG. 1A depicts soluble molecules, including: (1) a variant IgSF domain (vIgD) fused to an Fc chain; (2) a stack molecule containing a first variant IgSF domain (first vIgD) and a second IgSF domain, such as a second variant IgSF domain (second vIgD); (3) a tumor targeting IgSF molecule containing a first variant IgSF domain (vIgD) and an IgSF domain that targets to a tumor antigen, such as an NKp30 IgSF domain; and (4) a variant IgSF domain (vIgD) linked to an antibody (V-mAb). FIG. 1B depicts a transmembrane immunomodulatory protein (TIP) containing a variant IgSF domain (vIgD) expressed on the surface of a cell. In an exemplary embodiment, the cognate binding partner of the transmembrane bound vIgD is an inhibitory receptor (e.g. PD-L1), and the TIP containing the vIgD (e.g. PD-L1 vIgD) antagonizes or blocks the negative signaling of the inhibitory receptor, thereby resulting in an activated T cell or effector T cell. In some cases, if clustering of the inhibitory receptor (PD-1) is proximal to an activating receptor (e.g. CD28) then agonizing activity by the TIP may be realized. FIG. 1C depicts a secreted immunomodulatory protein (SIP) in which a variant IgSF domain (vIgD) is secreted from a cell, such as a first T cell (e.g. CAR T cell). In an exemplary embodiment, the cognate binding partner of the secreted vIgD is an inhibitory receptor (e.g., PD-1), which can be expressed by the first cell (e.g., T cell, such as a CAR T cell) and/or on a second cell (e.g. T cell; either endogenous or engineered, such as a CAR T cell). Upon binding of the SIP with its cognate binding partner, the SIP antagonizes or blocks the negative signaling via the inhibitory receptor, thereby resulting in an activated T cell or effector T cell. In all cases, the vIgD can be a V-domain (IgV) only, the combination of the V-domain (IgV) and C-domain (IgC), including the entire extracellular domain (ECD), or any combination of Ig domains of the IgSF superfamily member.

[0059] FIG. 2 depicts an exemplary schematic of the activity of a variant IgSF domain (vIgD) fused to an Fc (vIgD-Fc) in which the vIgD is a variant of an IgSF domain of PD-L1. As shown, a soluble vIgD of PD-L1 interacts with its cognate binding partners to block interactions of PD-L1 or PD-L2 with PD-1, thereby blocking the PD-1 inhibitory receptor, and, in some cases, allowing the T cell to differentiate into an effector phenotype.

[0060] FIG. 3 depicts an exemplary schematic of a stack molecule that is a multi-target checkpoint antagonist containing a first variant IgSF domain (first vIgD) that is a PD-L1 or PD-L2 vIgD and a second IgSF domain (e.g. a second vIgD) that binds to a second inhibitory receptor. In the exemplary schematic, the second IgSF domain (e.g. second vIgD) is a CD112 or CD155 vIgD. As shown, the first vIgD and second vIgD interact with their cognate binding partners to block interactions of PD-L1 or PD-L2 with PD-1 and block interactions of CD155 or CD112 with TIGIT and/or CD112R, respectively, thereby blocking multiple inhibitory receptors.

[0061] FIG. 4 depicts an exemplary schematic of a stack molecule for localizing the variant IgSF (vIgD) to a tumor cell. In this format, the stack molecule contains a first variant IgSF domain (first vIgD) and a second IgSF domain (e.g. a second vIgD) in which the second IgSF domain (e.g a second vIgD) is a tumor-targeted IgSF domain that binds to a tumor antigen. An exemplary tumor-targeted IgSF domain is an IgSF domain of NKp30, which binds to the tumor antigen B7-H6. In this depiction, the variant IgSF domain (vIgD) is a variant of an IgSF domain of PD-L1. As shown, binding of tumor-targeted IgSF domain to the surface of the tumor cell localizes the first variant IgSF domain on the tumor cell surface where it can interact with one or more of its cognate binding partners expressed on the surface of an adjacent immune cell (e.g. T cell) to antagonize PD-1 inhibitory activity and facilitate T cell activation.

[0062] FIG. 5A depicts various exemplary configurations of a stack molecule containing a first variant IgSF domain (first vIgD) and a second IgSF domain, such as a second variant IgSF domain (second vIgD). As shown, the first vIgD and second IgSF domain are independently linked, directly or indirectly, to the N- or C-terminus of an Fc region. For generating a homodimeric Fc molecule, the Fc region is one that is capable of forming a homodimer with a matched Fc region by co-expression of the individual Fc region in a cell. For generating a heterodimeric Fc molecule, the individual Fc region contain mutations (e.g. “knob-into-hole” mutations in the CH3 domain), such that formation of the heterodimer is favored compared to homodimers when the individual Fc region are co-expressed in a cell.

[0063] FIG. 5B depicts various exemplary configurations of a stack molecule containing a first variant IgSF domain (first vIgD), a second IgSF domain, such as a second variant IgSF domain (second vIgD), and a third IgSF domain, such as a third variant IgSF domain (third vIgD). As shown, the first vIgD, second IgSF, and third IgSF domains are independently linked, directly or indirectly, to the N- or C-terminus of an Fc region. For generating a homodimeric Fc molecule, the Fc region is one that is capable of forming a homodimer with a matched Fc region by co-expression of the individual Fc region in a cell.

[0064] FIG. 6 depicts an exemplary schematic of the activity of a variant IgSF domain (vIgD)—conjugated to an antibody (V-Mab) in which the antibody (e.g. anti-HER2 antibody) binds to an antigen on the surface of the tumor cell to localize the vIgD to the cell. As shown, binding of the antibody to the surface of the tumor cell localizes the vIgD on the tumor cell surface where it can interact with one or more of its cognate binding partners expressed on the surface of an adjacent immune cell (e.g. T cell) to agonize or antagonize receptor signaling. In an exemplary embodiment as shown, the variant IgSF domain (vIgD) is a variant of an IgSF domain of PD-L1 that binds, such as has increased affinity for, the inhibitory receptor PD-1. Binding of the PD-L1 vIgD to the PD-1 inhibitory receptor antagonizes or blocks the negative signaling of the inhibitory receptor, thereby resulting in an activated T cell or effector T cell. In some cases, if clustering of the inhibitory receptor (PD-1) is proximal to an activating receptor (e.g. CD28) then agonizing of the inhibitory receptor activity by the TIP may be realized.

[0065] FIG. 7A-7C depicts various exemplary configurations of a variant IgSF-antibody conjugate (V-Mab). FIG. 7A shows various configurations in which a variant IgSF domain is linked, directly or indirectly, to the N- and/or C-terminus of the light chain of an antibody. FIG. 7B shows various configurations in which a variant IgSF domain is linked, directly or indirectly, to the N- and/or C-terminus of the heavy chain of an antibody. FIG. 7C depicts the results V-Mab configurations when a light chain of FIG. 7A and a heavy chain of FIG. 7B are co-expressed in a cell.

[0066] FIG. 8 and FIG. 9 depict the results for soluble variant PD-L1 IgV-Fc bioactivity tested in a human Mixed Lymphocyte Reaction (MLR). Approximately, 10,000 matured DC and 100,000 purified allogeneic CD3+ T cells were co-cultured with various increasing concentrations of variant PD-L1 IgV-Fc fusion proteins. Irrelevant human IgG or media only (designated “No Add”) were used as negative controls. Control proteins, PDL1-Fc (full wild-type PD-L1 extracellular domain), wildtype PD-L1 IgV-Fc and positive control anti-PD-1 monoclonal antibody (nivolumab) were assessed. FIG. 8 and FIG. 9 sets forth the calculated levels of IFN-gamma in culture supernatants (pg/mL) at the indicated concentration of variant IgV-Fc fusion molecule.

[0067] FIG. 10 depicts proliferation studies for T cells transduced with exemplary tested variant PD-L1 SIP.

[0068] FIG. 11 depicts dose response for binding of the indicated variant IgV-Fc fusion molecules, PD-L1/CD155 stack Fc fusion molecule, or PD-L1/CD155/CD112 stack Fc fusion molecule to exhausted T cells.

[0069] FIG. 12 sets forth the calculated levels of IFN-gamma in culture supernatants (pg/mL) of exhausted T cells at the indicated concentration of variant IgV-Fc fusion molecule, PD-L1/CD155 stack Fc fusion molecule, or antibody controls.

### DETAILED DESCRIPTION

[0070] Provided herein are immunomodulatory proteins that are or comprise variants or mutants of Programmed cell death 1 ligand 1 or PD-L1 (also known as cluster of differentiation 274, CD274. B7 homolog 1 or B7-H1) or specific binding fragments thereof that exhibit activity to bind to at least one target ligand cognate binding partner (also called counter-structure protein). In some embodiments, the variant PD-L1 polypeptides contain one or more amino acid modifications (e.g. amino acid substitutions, deletions or additions) compared to an unmodified or wild-type PD-L1 polypeptide. In some embodiments, the one or more amino acid modifications (e.g. substitutions) are in an IgSF domain (e.g. IgV or ECD) of an unmodified or wild-type PD-L1 polypeptide. In some embodiments, the variant PD-L1 polypeptide and immunomodulatory proteins exhibits altered, such as increased or decreased, binding activity or affinity for at least one cognate binding partner, such as at least one of PD-1 or CD80. In some embodiments, the immunomodulatory proteins are soluble. In some embodiments, the immunomodulatory proteins are transmembrane immunomodulatory proteins capable of being expressed on the surface of cells. In some embodiments, also provided herein are one or more other immunomodulatory proteins that are conjugates or fusions containing a variant PD-L1 polypeptide provided herein and one or more other moiety or polypeptide.

[0071] In some embodiments, the variant PD-L1 polypeptides and immunomodulatory proteins modulate an immunological immune response, such an increase or decrease an immune response. In some embodiments, the variant PD-L1 polypeptides and immunomodulatory proteins provided herein can be used for the treatment of diseases or conditions that are associated with a dysregulated immune response.

[0072] In some embodiments, the provided variant PD-L1 polypeptides modulate T cell activation via interactions with costimulatory and/or coinhibitory signaling molecules. In general, antigen specific T-cell activation generally requires two distinct signals. The first signal is provided by the interaction of the T-cell receptor (TCR) with major histocompatibility complex (MHC) associated antigens present on antigen presenting cells (APCs). The second signal is costimulatory to TCR engagement and is necessary for T cell proliferation, differentiation and/or survival, including, in some cases, to avoid T-cell apoptosis or anergy.

[0073] In some embodiments, under normal physiological conditions, the T cell-mediated immune response is initiated by antigen recognition by the T cell receptor (TCR) and is regulated by a balance of co-stimulatory and inhibitory signals (e.g., immune checkpoint proteins). The immune system relies on immune checkpoints to prevent autoimmunity (i.e., self-tolerance) and to protect tissues from excessive damage during an immune response, for example during an attack against a pathogenic infection. In some cases, however, these immunomodulatory proteins can be dysregulated in diseases and conditions, including tumors, as a mechanism for evading the immune system.

[0074] In some embodiments, among known T-cell costimulatory receptors is Programmed cell death protein 1 or PD-1, which is the T-cell costimulatory receptor for the ligands PD-L1 (also known as cluster of differentiation 274, CD274. B7 homolog 1 or B7-H1) and Programmed cell death 1 ligand 2 or PD-L2 (also known as PDCD1L2, PDCD1LG2, cluster of differentiation 273, CD273. or B7-DC). PD-L1 and PD-L2 are normally expressed on the surface of T cells, B cells, and myeloid cells. PD-L1 and PD-L2 are negative regulators of immune activation and are capable of down-modulating the immune response via interactions with programmed death 1 (PD-1) receptor. In some aspects, PD-1 is expressed on NK cells and T cells, including CD4+ and CD8+ T cells, whereby engagement of PD-1 can inhibit activation cell activation, proliferation, and/or expansion.

[0075] However, PD-L1 ligands can also bind to Cluster of differentiation 80 (also known as CD80 or B7-1). The binding of PD-L1 to CD80 can block the interaction between PD-L1 and PD-1, and thereby potentiate or enhance the immune response. Thus, in some cases, interaction of PD-L1 with CD80 and PD-L1 with PD-1 yields opposing effects in modulating immune responses. Thus, PD-1 and CD80 may play opposing roles in immune responses to modulate pro-inflammatory or anti-inflammatory response, which, in some cases, are associated with a number of diseases and conditions.

[0076] In some embodiments, PD-1 and CD80 may play complementary roles in modeling an immune response. In some embodiments, enhancement or suppression of the activity of PD-1 receptor has clinical significance for treatment of inflammatory and autoimmune disorders, cancer, and viral infections. In some cases, however, therapies to intervene and alter the immunomodulatory effects of such receptors are constrained by the spatial orientation requirements as well as size limitations imposed by the confines of the immunological synapse. In some aspects, existing therapeutic drugs, including antibody drugs, may not be able to interact simultaneously with the multiple target proteins involved in modulating these interactions. In addition, in some cases, existing therapeutic drugs may only have the ability to antagonize but not agonize an immune response. Additionally, pharmacokinetic differences between drugs that independently target one of these receptors can create difficulties in properly maintaining a desired blood concentration of such drug combinations throughout the course of treatment.

[0077] In some embodiments, the provided variant PD-L1 polypeptides or immunomodulatory proteins modulate (e.g. increase or decrease) immunological activity associated PD-1. Thus, in some embodiments, the provided polypeptides overcome these constraints by providing variant PD-L1 with altered (e.g. increased or decreased) binding affinities to PD-1, thereby agonizing or antagonizing the effects of the receptor. In some embodiments, the provided polypeptides overcome these constraints by providing variant PD-L1 with altered (e.g. increased or decreased) binding affinities to CD80, thereby modulating the effects of the interaction between PD-1 and PD-L1. Methods of making and using these variant PD-L1 are also provided.

[0078] All publications, including patents, patent applications scientific articles and databases, mentioned in this specification are herein incorporated by reference in their entirety for all purposes to the same extent as if each individual publication, including patent, patent application, scientific article or database, were specifically and individually indicated to be incorporated by reference. If a definition set forth herein is contrary to or otherwise inconsistent with a definition set forth in the patents, applications, published applications and other publications that are herein incorporated by reference, the definition set forth herein prevails over the definition that is incorporated herein by reference.

[0079] The section headings used herein are for organizational purposes only and are not to be construed as limiting the subject matter described.

### I. DEFINITIONS

[0080] Unless defined otherwise, all terms of art, notations and other technical and scientific terms or terminology used herein are intended to have the same meaning as is commonly understood by one of ordinary skill in the art to which the claimed subject matter pertains. In some cases, terms with commonly understood meanings are defined herein for clarity and/or for ready reference, and the inclusion of such definitions herein should not necessarily be construed to represent a substantial difference over what is generally understood in the art.

[0081] The terms used throughout this specification are defined as follows unless otherwise limited in specific instances. As used in the specification and the appended claims, the singular forms “a,” “an,” and “the” include plural referents unless the context clearly dictates otherwise. Unless defined otherwise, all technical and scientific terms, acronyms, and abbreviations used herein have the same meaning as commonly understood by one of ordinary skill in the art to which the invention pertains. Unless indicated otherwise, abbreviations and symbols for chemical and biochemical names is per IUPAC-IUB nomenclature. Unless indicated otherwise, all numerical ranges are inclusive of the values defining the range as well as all integer values in-between.

[0082] The term “affinity modified” as used in the context of an immunoglobulin superfamily domain, means a mammalian immunoglobulin superfamily (IgSF) domain having an altered amino acid sequence (relative to the corresponding wild-type parental or unmodified IgSF domain) such that it has an increased or decreased binding affinity or avidity to at least one of its cognate binding partners (alternatively “counter-structures”) compared to the parental wild-type or unmodified (i.e., non-affinity modified) IgSF control domain. Included in this context is an affinity modified PD-L1 IgSF domain. In some embodiments, the affinity-modified IgSF domain can contain 1, 2, 3, 4, 5, 6, 7, 8, 9, 10, 11, 12, 13, 14, 15, 16, 17, 18, 19, 20, 21, 22, 23, 24, 25, 26, 27, 28, 29, 30 or more amino acid differences, such as amino acid substitutions, in a wildtype or unmodified IgSF domain. An increase or decrease in binding affinity or avidity can be determined using well known binding assays such as flow cytometry. Larsen et al., American Journal of Transplantation, Vol 5: 443-453 (2005). See also, Linsley et al., Immunity, Vol 1(9): 793-801 (1994). An increase in a protein's binding affinity or avidity to its cognate binding partner(s) is to a value at least 10% greater than that of the wild-type IgSF domain control and in some embodiments, at least 20%, 30%, 40%, 50%, 100%, 200%, 300%, 500%, 1000%, 5000%, or 10000% greater than that of the wild-type IgSF domain control value. A decrease in a protein's binding affinity or avidity to at least one of its cognate binding partner is to a value no greater than 90% of the control but no less than 10% of the wild-type IgSF domain control value, and in some embodiments no greater than 80%, 70% 60%, 50%, 40%, 30%, or 20% but no less than 10% of the wild-type IgSF domain control value. An affinity-modified protein is altered in primary amino acid sequence by substitution, addition, or deletion of amino acid residues. The term “affinity modified IgSF domain” is not to be construed as imposing any condition for any particular starting composition or method by which the affinity-modified IgSF domain was created. Thus, the affinity modified IgSF domains of the present invention are not limited to wild type IgSF domains that are then transformed to an affinity modified IgSF domain by any particular process of affinity modification. An affinity modified IgSF domain polypeptide can, for example, be generated starting from wild type mammalian IgSF domain sequence information, then modeled in silico for binding to its cognate binding partner, and finally recombinantly or chemically synthesized to yield the affinity modified IgSF domain composition of matter. In but one alternative example, an affinity modified IgSF domain can be created by site-directed mutagenesis of a wild-type IgSF domain. Thus, affinity modified IgSF domain denotes a product and not necessarily a product produced by any given process. A variety of techniques including recombinant methods, chemical synthesis, or combinations thereof, may be employed.

[0083] The term “allogeneic” as used herein means a cell or tissue that is removed from one organism and then infused or adoptively transferred into a genetically dissimilar organism of the same species. In some embodiments of the invention, the species is murine or human.

[0084] The term “autologous” as used herein means a cell or tissue that is removed from the same organism to which it is later infused or adoptively transferred. An autologous cell or tissue can be altered by, for example, recombinant DNA methodologies, such that it is no longer genetically identical to the native cell or native tissue which is removed from the organism. For example, a native autologous T-cell can be genetically engineered by recombinant DNA techniques to become an autologous engineered cell expressing a transmembrane immunomodulatory protein and/or chimeric antigen receptor (CAR), which in some cases involves engineering a T-cell or TIL (tumor infiltrating lymphocyte). The engineered cells are then infused into a patient from which the native T-cell was isolated. In some embodiments, the organism is human or murine.

[0085] The terms “binding affinity,” and “binding avidity” as used herein means the specific binding affinity and specific binding avidity, respectively, of a protein for its counter-structure under specific binding conditions. In biochemical kinetics avidity refers to the accumulated strength of multiple affinities of individual non-covalent binding interactions, such as between PD-L1 and its counter-structures PD-1 and/or CD80. As such, avidity is distinct from affinity, which describes the strength of a single interaction. An increase or attenuation in binding affinity of a variant PD-L1 containing an affinity modified PD-L1 IgSF domain to its counter-structure is determined relative to the binding affinity of the unmodified PD-L1, such as an unmodified PD-L1 containing the native or wild-type IgSF domain, such as IgV domain. Methods for determining binding affinity or avidity are known in art. See, for example, Larsen et al., American Journal of Transplantation, Vol 5: 443-453 (2005). In some embodiments, a variant PD-L1 of the invention (i.e. a PD-L1 protein containing an affinity modified IgSF domain) specifically binds to PD-1 and/or CD80 measured by flow cytometry with a binding affinity that yields a Mean Fluorescence Intensity (MFI) value at least 10%, 20%, 30%, 40%, 50%, 60%, 70%, 80%, 90%, or 100% greater than a wild-type PD-L1 control in a binding assay.

[0086] The term “biological half-life” refers to the amount of time it takes for a substance, such as an immunomodulatory polypeptide comprising a variant PD-L1 of the present invention, to lose half of its pharmacologic or physiologic activity or concentration. Biological half-life can be affected by elimination, excretion, degradation (e.g., enzymatic) of the substance, or absorption and concentration in certain organs or tissues of the body. In some embodiments, biological half-life can be assessed by determining the time it takes for the blood plasma concentration of the substance to reach half its steady state level (“plasma half-life”). Conjugates that can be used to derivatize and increase the biological half-life of polypeptides of the invention are known in the art and include, but are not limited to, polyethylene glycol (PEG), hydroxyethyl starch (HES), XTEN (extended recombinant peptides; see, WO2013130683), human serum albumin (HSA), bovine serum albumin (BSA), lipids (acylation), and poly-Pro-Ala-Ser (PAS), polyglutamic acid (glutamylation).

[0087] The term “chimeric antigen receptor” or “CAR” as used herein refers to an artificial (i.e., man-made) transmembrane protein expressed on a mammalian cell comprising at least an ectodomain, a transmembrane, and an endodomain. Optionally, the CAR protein includes a “spacer” which covalently links the ectodomain to the transmembrane domain. A spacer is often a polypeptide linking the ectodomain to the transmembrane domain via peptide bonds. The CAR is typically expressed on a mammalian lymphocyte. In some embodiments, the CAR is expressed on a mammalian cell such as a T-cell or a tumor infiltrating lymphocyte (TIL). A CAR expressed on a T-cell is referred to herein as a “CAR T-cell” or “CAR-T.” In some embodiments the CAR-T is a T helper cell, a cytotoxic T-cell, a natural killer T-cell, a memory T-cell, a regulatory T-cell, or a gamma delta T-cell. When used clinically in, e.g. adoptive cell transfer, a CAR-T with antigen binding specificity to the patient's tumor is typically engineered to express on a T-cell obtained from the patient. The engineered T-cell expressing the CAR is then infused back into the patient. The CAR-T is thus often an autologous CAR-T although allogeneic CAR-T are included within the scope of the invention. The ectodomain of a CAR comprises an antigen binding region, such as an antibody or antigen binding fragment thereof (e.g. scFv), that specifically binds under physiological conditions with a target antigen, such as a tumor specific antigen. Upon specific binding a biochemical chain of events (i.e., signal transduction) results in modulation of the immunological activity of the CAR-T. Thus, for example, upon specific binding by the antigen binding region of the CAR-T to its target antigen can lead to changes in the immunological activity of the T-cell activity as reflected by changes in cytotoxicity, proliferation or cytokine production. Signal transduction upon CAR-T activation is achieved in some embodiments by the CD3-zeta chain (“CD3-z”) which is involved in signal transduction in native mammalian T-cells. CAR-Ts can further comprise multiple signaling domains such as CD28, 41BB or OX40, to further modulate immunomodulatory response of the T-cell. CD3-z comprises a conserved motif known as an immunoreceptor tyrosine-based activation motif (ITAM) which is involved in T-cell receptor signal transduction.

[0088] The term “collectively” or “collective” when used in reference to cytokine production induced by the presence of two or more variant PD-L1 of the invention in an in vitro assay, means the overall cytokine expression level irrespective of the cytokine production induced by individual variant PD-L1. In some embodiments, the cytokine being assayed is IFN-gamma, such as in an in vitro primary T-cell assay.

[0089] The term “cognate binding partner” (used interchangeably with “counter-structure”) in reference to a polypeptide, such as in reference to an IgSF domain of a variant PD-L1, refers to at least one molecule (typically a native mammalian protein) to which the referenced polypeptide specifically binds under specific binding conditions. In some aspects, a variant PD-L1 containing an affinity modified IgSF domain specifically binds to the counter-structure of the corresponding native or wildtype PD-L1 but with increased or attenuated affinity. A species of ligand recognized and specifically binding to its cognate receptor under specific binding conditions is an example of a counter-structure or cognate binding partner of that receptor. A “cognate cell surface binding partner” is a cognate binding partner expressed on a mammalian cell surface. A “cell surface molecular species” is a cognate binding partner of ligands of the immunological synapse (IS), expressed on and by cells, such as mammalian cells, forming the immunological synapse.

[0090] As used herein, “conjugate,” “conjugation” or grammatical variations thereof refers the joining or linking together of two or more compounds resulting in the formation of another compound, by any joining or linking methods known in the art. It can also refer to a compound which is generated by the joining or linking together two or more compounds. For example, a variant PD-L1 polypeptide linked directly or indirectly to one or more chemical moieties or polypeptide is an exemplary conjugate. Such conjugates include fusion proteins, those produced by chemical conjugates and those produced by any other methods.

[0091] The term “competitive binding” as used herein means that a protein is capable of specifically binding to at least two cognate binding partners but that specific binding of one cognate binding partner inhibits, such as prevents or precludes, simultaneous binding of the second cognate binding partner. Thus, in some cases, it is not possible for a protein to bind the two cognate binding partners at the same time. Generally, competitive binders contain the same or overlapping binding site for specific binding but this is not a requirement. In some embodiments, competitive binding causes a measurable inhibition (partial or complete) of specific binding of a protein to one of its cognate binding partner due to specific binding of a second cognate binding partner. A variety of methods are known to quantify competitive binding such as ELISA (enzyme linked immunosorbent assay) assays.

[0092] The term “conservative amino acid substitution” as used herein means an amino acid substitution in which an amino acid residue is substituted by another amino acid residue having a side chain R group with similar chemical properties (e.g., charge or hydrophobicity). Examples of groups of amino acids that have side chains with similar chemical properties include 1) aliphatic side chains: glycine, alanine, valine, leucine, and isoleucine; 2) aliphatic-hydroxyl side chains: serine and threonine; 3) amide-containing side chains: asparagine and glutamine; 4) aromatic side chains: phenylalanine, tyrosine, and tryptophan; 5) basic side chains: lysine, arginine, and histidine; 6) acidic side chains: aspartic acid and glutamic acid; and 7) sulfur-containing side chains: cysteine and methionine. Conservative amino acids substitution groups are: valine-leucine-isoleucine, phenylalanine-tyrosine, lysine-arginine, alanine-valine, glutamate-aspartate, and asparagine-glutamine.

[0093] The term, “corresponding to” with reference to positions of a protein, such as recitation that nucleotides or amino acid positions “correspond to” nucleotides or amino acid positions in a disclosed sequence, such as set forth in the Sequence listing, refers to nucleotides or amino acid positions identified upon alignment with the disclosed sequence based on structural sequence alignment or using a standard alignment algorithm, such as the GAP algorithm. For example, corresponding residues can be determined by alignment of a reference sequence with the sequence of wild-type PD-L1 set forth in SEQ ID NO:30 or 1728 (ECD domain) or set forth in SEQ ID NO: 55 or 309 (IgV domain) by structural alignment methods as described herein. By aligning the sequences, one skilled in the art can identify corresponding residues, for example, using conserved and identical amino acid residues as guides.

[0094] The terms “decrease” or “attenuate” “or suppress” as used herein means to decrease by a statistically significant amount. A decrease can be at least 10%, 20%, 30%, 40%, 50%, 60%, 70%, 80%, 90%, or 100%.

[0095] The terms “derivatives” or “derivatized” refer to modification of a protein by covalently linking it, directly or indirectly, to a composition so as to alter such characteristics as biological half-life, bioavailability, immunogenicity, solubility, toxicity, potency, or efficacy while retaining or enhancing its therapeutic benefit. Derivatives of immunomodulatory polypeptides of the invention are within the scope of the invention and can be made by, for example, glycosylation, pegylation, lipidation, or Fc-fusion.

[0096] As used herein, “domain” (typically a sequence of three or more, generally 5 or 7 or more amino acids, such as 10 to 200 amino acid residues) refers to a portion of a molecule, such as a protein or encoding nucleic acid, that is structurally and/or functionally distinct from other portions of the molecule and is identifiable. For example, domains include those portions of a polypeptide chain that can form an independently folded structure within a protein made up of one or more structural motifs and/or that is recognized by virtue of a functional activity, such as binding activity. A protein can have one, or more than one, distinct domains. For example, a domain can be identified, defined or distinguished by homology of the primary sequence or structure to related family members, such as homology to motifs. In another example, a domain can be distinguished by its function, such as an ability to interact with a biomolecule, such as a cognate binding partner. A domain independently can exhibit a biological function or activity such that the domain independently or fused to another molecule can perform an activity, such as, for example binding. A domain can be a linear sequence of amino acids or a non-linear sequence of amino acids. Many polypeptides contain a plurality of domains. Such domains are known, and can be identified by those of skill in the art. For exemplification herein, definitions are provided, but it is understood that it is well within the skill in the art to recognize particular domains by name. If needed appropriate software can be employed to identify domains.

[0097] The term “ectodomain” as used herein refers to the region of a membrane protein, such as a transmembrane protein, that lies outside the vesicular membrane. Ectodomains often comprise binding domains that specifically bind to ligands or cell surface receptors, such as via a binding domain that specifically binds to the ligand or cell surface receptor. The ectodomain of a cellular transmembrane protein is alternately referred to as an extracellular domain.

[0098] The terms “effective amount” or “therapeutically effective amount” refer to a quantity and/or concentration of a therapeutic composition of the invention, including a protein composition or cell composition, that when administered ex vivo (by contact with a cell from a patient) or in vivo (by administration into a patient) either alone (i.e., as a monotherapy) or in combination with additional therapeutic agents, yields a statistically significant decrease in disease progression as, for example, by ameliorating or eliminating symptoms and/or the cause of the disease. An effective amount may be an amount that relieves, lessens, or alleviates at least one symptom or biological response or effect associated with a disease or disorder, prevents progression of the disease or disorder, or improves physical functioning of the patient. In the case of cell therapy, the effective amount is an effective dose or number of cells administered to a patient by adoptive cell therapy. In some embodiments the patient is a mammal such as a non-human primate or human patient.

[0099] The term “endodomain” as used herein refers to the region found in some membrane proteins, such as transmembrane proteins, that extends into the interior space defined by the cell surface membrane. In mammalian cells, the endodomain is the cytoplasmic region of the membrane protein. In cells, the endodomain interacts with intracellular constituents and can be play a role in signal transduction and thus, in some cases, can be an intracellular signaling domain. The endodomain of a cellular transmembrane protein is alternately referred to as a cytoplasmic domain, which, in some cases, can be a cytoplasmic signaling domain.

[0100] The terms “enhanced” or “increased” as used herein in the context of increasing immunological activity of a mammalian lymphocyte means to increase one or more activities the lymphocyte. An increased activity can be one or more of increase cell survival, cell proliferation, cytokine production, or T-cell cytotoxicity, such as by a statistically significant amount. In some embodiments, reference to increased immunological activity means to increase interferon gamma (IFN-gamma) production, such as by a statistically significant amount. In some embodiments, the immunological activity can be assessed in a mixed lymphocyte reaction (MLR) assay. Methods of conducting MLR assays are known in the art. Wang et al., Cancer Immunol Res. 2014 September: 2(9):846-56. Other methods of assessing activities of lymphocytes are known in the art, including any assay as described herein. In some embodiments an enhancement can be an increase of at least 10%, 20%, 30%, 40%, 50%, 75%, 100%, 200%, 300%, 400%, or 500% greater than a non-zero control value.

[0101] The term “engineered cell” as used herein refers to a mammalian cell that has been genetically modified by human intervention such as by recombinant DNA methods or viral transduction. In some embodiments, the cell is an immune cell, such as a lymphocyte (e.g. T cell, B cell, NK cell) or an antigen presenting cell (e.g. dendritic cell). The cell can be a primary cell from a patient or can be a cell line. In some embodiments, an engineered cell of the invention comprises a variant PD-L1 of the invention engineered to modulate immunological activity of a T-cell expressing PD-1 and/or CD80 to which the variant PD-L1 specifically binds. In some embodiments, the variant PD-L1 is a transmembrane immunomodulatory protein (hereinafter referred to as “TIP”) containing the extracellular domain or a portion thereof containing the IgV or ECD domain linked to a transmembrane domain (e.g. a PD-L1 transmembrane domain) and, optionally, an intracellular signaling domain. In some cases, the TIP is formatted as a chimeric receptor containing a heterologous cytoplasmic signaling domain or endodomain. In some embodiments, an engineered cell is capable of expressing and secreting an immunomodulatory protein as described herein. Among provided engineered cells also are cells further containing an engineered T-cell receptor (TCR) or chimeric antigen receptor (CAR).

[0102] The term “engineered T-cell” as used herein refers to a T-cell such as a T helper cell, cytotoxic T-cell (alternatively, cytotoxic T lymphocyte or CTL), natural killer T-cell, regulatory T-cell, memory T-cell, or gamma delta T-cell, that has been genetically modified by human intervention such as by recombinant DNA methods or viral transduction methods. An engineered T-cell comprises a variant PD-L1 transmembrane immunomodulatory protein (TIP) or secreted immunomodulatory protein (SIP) of the present invention that is expressed on the T-cell and is engineered to modulate immunological activity of the engineered T-cell itself, or a mammalian cell to which the variant PD-L1 expressed on the T-cell specifically binds.

[0103] The term “engineered T-cell receptor” or “engineered TCR” refers to a T-cell receptor (TCR) engineered to specifically bind with a desired affinity to a major histocompatibility complex (MHC)/peptide target antigen that is selected, cloned, and/or subsequently introduced into a population of T-cells, often used for adoptive immunotherapy. In contrast to engineered TCRs, CARs are engineered to bind target antigens in a MHC independent manner.

[0104] The term “expressed on” as used herein is used in reference to a protein expressed on the surface of a cell, such as a mammalian cell. Thus, the protein is expressed as a membrane protein. In some embodiments, the expressed protein is a transmembrane protein. In some embodiments, the protein is conjugated to a small molecule moiety such as a drug or detectable label. Proteins expressed on the surface of a cell can include cell-surface proteins such as cell surface receptors that are expressed on mammalian cells.

[0105] The term “half-life extending moiety” refers to a moiety of a polypeptide fusion or chemical conjugate that extends the half-life of a protein circulating in mammalian blood serum compared to the half-life of the protein that is not so conjugated to the moiety. In some embodiments, half-life is extended by greater than or greater than about 1.2-fold, 1.5-fold, 2.0-fold, 3.0-fold, 4.0-fold, 5.0-fold, or 6.0-fold. In some embodiments, half-life is extended by more than 6 hours, more than 12 hours, more than 24 hours, more than 48 hours, more than 72 hours, more than 96 hours or more than 1 week after in vivo administration compared to the protein without the half-life extending moiety. The half-life refers to the amount of time it takes for the protein to lose half of its concentration, amount, or activity. Half-life can be determined for example, by using an ELISA assay or an activity assay. Exemplary half-life extending moieties include an Fc domain, a multimerization domain, polyethylene glycol (PEG), hydroxyethyl starch (HES), XTEN (extended recombinant peptides; see, WO2013130683), human serum albumin (HSA), bovine serum albumin (BSA), lipids (acylation), and poly-Pro-Ala-Ser (PAS), and polyglutamic acid (glutamylation).

[0106] The term “immunological synapse” or “immune synapse” as used herein means the interface between a mammalian cell that expresses MHC I (major histocompatibility complex) or MHC II, such as an antigen-presenting cell or tumor cell, and a mammalian lymphocyte such as an effector T cell or Natural Killer (NK) cell.

[0107] An Fc (fragment crystallizable) region or domain of an immunoglobulin molecule (also termed an Fc polypeptide) corresponds largely to the constant region of the immunoglobulin heavy chain, and is responsible for various functions, including the antibody's effector function(s). The Fc domain contains part or all of a hinge domain of an immunoglobulin molecule plus a CH2 and a CH3 domain. The Fc domain can form a dimer of two polypeptide chains joined by one or more disulfide bonds. In some embodiments, the Fc is a variant Fc that exhibits reduced (e.g. reduced greater than 30%, 40%, 50%, 60%, 70%, 80%, 90% or more) activity to facilitate an effector function. In some embodiments, reference to amino acid substitutions in an Fc region is by EU numbering system unless described with reference to a specific SEQ ID NO. EU numbering is known and is according to the most recently updated IMGT Scientific Chart (IMGT®, the international ImMunoGeneTics information system®, http://www.imgt.org/IMGTScientificChart/Numbering/Hu_IGHGnber.html (created: 17 May 2001, last updated: 10 Jan. 2013) and the EU index as reported in Kabat, E. A. et al. Sequences of Proteins of Immunological interest. 5th ed. US Department of Health and Human Services, NIH publication No. 91-3242 (1991).

[0108] An immunoglobulin Fc fusion (“Fc-fusion”), such as an immunomodulatory Fc fusion protein, is a molecule comprising one or more polypeptides (or one or more small molecules) operably linked to an Fc region of an immunoglobulin. An Fc-fusion may comprise, for example, the Fc region of an antibody (which facilitates effector functions and pharmacokinetics) and a variant PD-L1. An immunoglobulin Fc region may be linked indirectly or directly to one or more variant PD-L1 or small molecules (fusion partners). Various linkers are known in the art and can optionally be used to link an Fc to a fusion partner to generate an Fc-fusion. Fc-fusions of identical species can be dimerized to form Fc-fusion homodimers, or using non-identical species to form Fc-fusion heterodimers. In some embodiments, the Fc is a mammalian Fc such as a murine or human Fc.

[0109] The term “host cell” refers to a cell that can be used to express a protein encoded by a recombinant expression vector. A host cell can be a prokaryote, for example, E. coli, or it can be a eukaryote, for example, a single-celled eukaryote (e.g., a yeast or other fungus), a plant cell (e.g., a tobacco or tomato plant cell), an animal cell (e.g., a human cell, a monkey cell, a hamster cell, a rat cell, a mouse cell, or an insect cell) or a hybridoma. Examples of host cells include Chinese hamster ovary (CHO) cells or their derivatives such as Veggie CHO and related cell lines which grow in serum-free media or CHO strain DX-B11, which is deficient in DHFR. Another example is Human Endothelial Kidney 293 cells or their derivatives. In some embodiments, a host cell is a mammalian cell (e.g., a human cell, a monkey cell, a hamster cell, a rat cell, a mouse cell, or an insect cell).

[0110] The term “immunoglobulin” (abbreviated “Ig”) as used herein refers to a mammalian immunoglobulin protein including any of the five human classes of antibody: IgA (which includes subclasses IgA1 and IgA2), IgD, IgE, IgG (which includes subclasses IgG1, IgG2, IgG3, and IgG4), and IgM. The term is also inclusive of immunoglobulins that are less than full-length, whether wholly or partially synthetic (e.g., recombinant or chemical synthesis) or naturally produced, such as antigen binding fragment (Fab), variable fragment (Fv) containing V_{H} and V_{L}, the single chain variable fragment (scFv) containing V_{H} and V_{L} linked together in one chain, as well as other antibody V region fragments, such as Fab′, F(ab)₂, F(ab′)₂, dsFv diabody, Fc, and Fd polypeptide fragments. Bispecific antibodies, homobispecific and heterobispecific, are included within the meaning of the term.

[0111] The term “immunoglobulin superfamily” or “IgSF” as used herein means the group of cell surface and soluble proteins that are involved in the recognition, binding, or adhesion processes of cells. Molecules are categorized as members of this superfamily based on shared structural features with immunoglobulins (i.e., antibodies); they all possess a domain known as an immunoglobulin domain or fold. Members of the IgSF include cell surface antigen receptors, co-receptors and co-stimulatory molecules of the immune system, molecules involved in antigen presentation to lymphocytes, cell adhesion molecules, certain cytokine receptors and intracellular muscle proteins. They are commonly associated with roles in the immune system. Proteins in the immunological synapse are often members of the IgSF. IgSF can also be classified into “subfamilies” based on shared properties such as function. Such subfamilies typically consist of from 4 to 30 IgSF members.

[0112] The terms “IgSF domain” or “immunoglobulin domain” or “Ig domain” as used herein refers to a structural domain of IgSF proteins. Ig domains are named after the immunoglobulin molecules. They contain about 70-110 amino acids and are categorized according to their size and function. Ig-domains possess a characteristic Ig-fold, which has a sandwich-like structure formed by two sheets of antiparallel beta strands. Interactions between hydrophobic amino acids on the inner side of the sandwich and highly conserved disulfide bonds formed between cysteine residues in the B and F strands, stabilize the Ig-fold. One end of the Ig domain has a section called the complementarity determining region that is important for the specificity of antibodies for their ligands. The Ig like domains can be classified (into classes) as: IgV, IgC (which either can be an IgC1 or IgC2), or IgI. Most Ig domains are either variable (IgV) or constant (IgC). IgV domains with 9 beta strands are generally longer than IgC domains with 7 beta strands. Ig domains of some members of the IgSF resemble IgV domains in the amino acid sequence, yet are similar in size to IgC domains. These are called IgC2 domains, while standard IgC domains are called IgC1 domains. T-cell receptor (TCR) chains contain two Ig domains in the extracellular portion; one IgV domain at the N-terminus and one IgC1 domain adjacent to the cell membrane. PD-L1 contains two Ig domains: one IgV and one IgC domain.

[0113] The term “IgSF species” as used herein means an ensemble of IgSF member proteins with identical or substantially identical primary amino acid sequence. Each mammalian immunoglobulin superfamily (IgSF) member defines a unique identity of all IgSF species that belong to that IgSF member. Thus, each IgSF family member is unique from other IgSF family members and, accordingly, each species of a particular IgSF family member is unique from the species of another IgSF family member. Nevertheless, variation between molecules that are of the same IgSF species may occur owing to differences in post-translational modification such as glycosylation, phosphorylation, ubiquitination, nitrosylation, methylation, acetylation, and lipidation. Additionally, minor sequence differences within a single IgSF species owing to gene polymorphisms constitute another form of variation within a single IgSF species as do wild type truncated forms of IgSF species owing to, for example, proteolytic cleavage. A “cell surface IgSF species” is an IgSF species expressed on the surface of a cell, generally a mammalian cell.

[0114] The term “immunological activity” as used herein in the context of mammalian lymphocytes such as T-cells refers to one or more cell survival, cell proliferation, cytokine production (e.g. interferon-gamma), or T-cell cytotoxicity activities. In some cases, an immunological activity can mean the cell expression of cytokines, such as chemokines or interleukins. Assays for determining enhancement or suppression of immunological activity include the MLR (mixed lymphocyte reaction) assays measuring interferon-gamma cytokine levels in culture supernatants (Wang et al., Cancer Immunol Res. 2014 September: 2(9):846-56), SEB (staphylococcal enterotoxin B) T cell stimulation assay (Wang et al., Cancer Immunol Res. 2014 September: 2(9):846-56), and anti-CD3 T cell stimulation assays (Li and Kurlander, J Transl Med. 2010: 8: 104). Since T cell activation is associated with secretion of IFN-gamma cytokine, detecting IFN-gamma levels in culture supernatants from these in vitro human T cell assays can be assayed using commercial ELISA kits (Wu et al, Immunol Lett 2008 Apr. 15; 117(1): 57-62). Induction of an immune response results in an increase in immunological activity relative to quiescent lymphocytes. An immunomodulatory protein, such as a variant PD-L1 polypeptide containing an affinity modified IgSF domain, as provided herein can in some embodiments increase or, in alternative embodiments, decrease IFN-gamma (interferon-gamma) expression in a primary T-cell assay relative to a wild-type IgSF member or IgSF domain control. Those of skill will recognize that the format of the primary T-cell assay used to determine an increase in IFN-gamma expression can differ from that employed to assay for a decrease in IFN-gamma expression. In assaying for the ability of an immunomodulatory protein or affinity modified IgSF domain of the invention to alter IFN-gamma expression in a primary T-cell assay, a Mixed Lymphocyte Reaction (MLR) assay can be used. Conveniently, in some cases, a soluble form of an affinity modified IgSF domain of the invention can be employed to determine its ability to increase or decrease the IFN-gamma expression in a MLR. Alternatively, a co-immobilization assay can be used. In a co-immobilization assay, a T-cell receptor signal, provided in some embodiments by anti-CD3 antibody, is used in conjunction with a co-immobilized affinity modified IgSF domain, such as variant PD-L1, to determine the ability to increase or decrease IFN-gamma expression relative to a wild-type IgSF domain control. Methods to assay the immunological activity of engineered cells, including to evaluate the activity of a variant PD-L1 transmembrane immunomodulatory protein, are known in the art and include, but are not limited to, the ability to expand T cells following antigen stimulation, sustain T cell expansion in the absence of re-stimulation, and anti-cancer activities in appropriate animal models. Assays also include assays to assess cytotoxicity, including a standard ⁵¹Cr-release assay (see e.g. Milone et al., (2009) Molecular Therapy 17: 1453-1464) or flow based cytotoxicity assays, or an impedance based cytotoxicity assay (Peper et al. (2014) Journal of Immunological Methods, 405:192-198).

[0115] An “immunomodulatory polypeptide” or “immunomodulatory protein” is a polypeptide or protein molecule that modulates immunological activity. By “modulation” or “modulating” an immune response is meant that immunological activity is either increased or decreased. An immunomodulatory protein can be a single polypeptide chain or a multimer (dimers or higher order multimers) of at least two polypeptide chains covalently bonded to each other by, for example, interchain disulfide bonds. Thus, monomeric, dimeric, and higher order multimeric polypeptides are within the scope of the defined term. Multimeric polypeptides can be homomultimeric (of identical polypeptide chains) or heteromultimeric (of non-identical polypeptide chains). An immunomodulatory protein of the invention comprises a variant PD-L1.

[0116] The term “increase” as used herein means to increase by a statistically significant amount. An increase can be at least 5%, 10%, 20%, 30%, 40%, 50%, 75%, 100%, or greater than a non-zero control value.

[0117] An “isoform” of PD-L1 is one of a plurality naturally occurring PD-L1 polypeptides that differ in amino acid sequence. Isoforms can be the product of splice variants of an RNA transcript expressed by a single gene, or the expression product of highly similar but different genes yielding a functionally similar protein such as may occur from gene duplication. As used herein, the term “isoform” of PD-L1 also refers to the product of different alleles of a PD-L1 gene.

[0118] The term “lymphocyte” as used herein means any of three subtypes of white blood cell in a mammalian immune system. They include natural killer cells (NK cells) (which function in cell-mediated, cytotoxic innate immunity), T cells (for cell-mediated, cytotoxic adaptive immunity), and B cells (for humoral, antibody-driven adaptive immunity). T cells include: T helper cells, cytotoxic T-cells, natural killer T-cells, memory T-cells, regulatory T-cells, or gamma delta T-cells. Innate lymphoid cells (ILC) are also included within the definition of lymphocyte.

[0119] The terms “mammal,” or “patient” specifically includes reference to at least one of a: human, chimpanzee, rhesus monkey, cynomolgus monkey, dog, cat, mouse, or rat.

[0120] The term “membrane protein” as used herein means a protein that, under physiological conditions, is attached directly or indirectly to a lipid bilayer. A lipid bilayer that forms a membrane can be a biological membrane such as a eukaryotic (e.g., mammalian) cell membrane or an artificial (i.e., man-made) membrane such as that found on a liposome. Attachment of a membrane protein to the lipid bilayer can be by way of covalent attachment, or by way of non-covalent interactions such as hydrophobic or electrostatic interactions. A membrane protein can be an integral membrane protein or a peripheral membrane protein. Membrane proteins that are peripheral membrane proteins are non-covalently attached to the lipid bilayer or non-covalently attached to an integral membrane protein. A peripheral membrane protein forms a temporary attachment to the lipid bilayer such that under the range of conditions that are physiological in a mammal, peripheral membrane protein can associate and/or disassociate from the lipid bilayer. In contrast to peripheral membrane proteins, integral membrane proteins form a substantially permanent attachment to the membrane's lipid bilayer such that under the range of conditions that are physiological in a mammal, integral membrane proteins do not disassociate from their attachment to the lipid bilayer. A membrane protein can form an attachment to the membrane by way of one layer of the lipid bilayer (monotopic), or attached by way of both layers of the membrane (polytopic). An integral membrane protein that interacts with only one lipid bilayer is an “integral monotopic protein”. An integral membrane protein that interacts with both lipid bilayers is an “integral polytopic protein” alternatively referred to herein as a “transmembrane protein”.

[0121] The terms “modulating” or “modulate” as used herein in the context of an immune response, such as a mammalian immune response, refer to any alteration, such as an increase or a decrease, of existing or potential immune responses that occurs as a result of administration of an immunomodulatory polypeptide comprising a variant PD-L1 of the present invention or as a result of administration of engineered cells expresses an immunomodulatory protein, such as a variant PD-L1 transmembrane immunomodulatory protein of the present invention. Thus, it refers to an alteration, such as an increase or decrease, of an immune response as compared to the immune response that occurs or is present in the absence of the administration of the immunomodulatory protein comprising the variant PD-L1 or cells expressing such an immunomodulatory polypeptide. Such modulation includes any induction, activation, suppression or alteration in degree or extent of immunological activity of an immune cell. Immune cells include B cells, T cells, NK (natural killer) cells, NK T cells, professional antigen-presenting cells (APCs), and non-professional antigen-presenting cells, and inflammatory cells (neutrophils, macrophages, monocytes, eosinophils, and basophils). Modulation includes any change imparted on an existing immune response, a developing immune response, a potential immune response, or the capacity to induce, regulate, influence, or respond to an immune response. Modulation includes any alteration in the expression and/or function of genes, proteins and/or other molecules in immune cells as part of an immune response. Modulation of an immune response or modulation of immunological activity includes, for example, the following: elimination, deletion, or sequestration of immune cells; induction or generation of immune cells that can modulate the functional capacity of other cells such as autoreactive lymphocytes, antigen presenting cells, or inflammatory cells; induction of an unresponsive state in immune cells (i.e., anergy); enhancing or suppressing the activity or function of immune cells, including but not limited to altering the pattern of proteins expressed by these cells. Examples include altered production and/or secretion of certain classes of molecules such as cytokines, chemokines, growth factors, transcription factors, kinases, costimulatory molecules, or other cell surface receptors or any combination of these modulatory events. Modulation can be assessed, for example, by an alteration in IFN-gamma (interferon gamma) expression relative to the wild-type PD-L1 control in a primary T cell assay (see, Zhao and Ji, Exp Cell Res. 2016 Jan. 1; 340(1): 132-138). Modulation can be assessed, for example, by an alteration of an immunological activity of engineered cells, such as an alteration in in cytotoxic activity of engineered cells or an alteration in cytokine secretion of engineered cells relative to cells engineered with a wild-type PD-L1 transmembrane protein

[0122] The term “molecular species” as used herein means an ensemble of proteins with identical or substantially identical primary amino acid sequence. Each mammalian immunoglobulin superfamily (IgSF) member defines a collection of identical or substantially identical molecular species. Thus, for example, human PD-L1 is an IgSF member and each human PD-L1 molecule is a molecular species of PD-L1. Variation between molecules that are of the same molecular species may occur owing to differences in post-translational modification such as glycosylation, phosphorylation, ubiquitination, nitrosylation, methylation, acetylation, and lipidation. Additionally, minor sequence differences within a single molecular species owing to gene polymorphisms constitute another form of variation within a single molecular species as do wild type truncated forms of a single molecular species owing to, for example, proteolytic cleavage. A “cell surface molecular species” is a molecular species expressed on the surface of a mammalian cell. Two or more different species of protein, each of which is present exclusively on one or exclusively the other (but not both) of the two mammalian cells forming the IS, are said to be in “cis” or “cis configuration” with each other. Two different species of protein, the first of which is exclusively present on one of the two mammalian cells forming the IS and the second of which is present exclusively on the second of the two mammalian cells forming the IS, are said to be in “trans” or “trans configuration.” Two different species of protein each of which is present on both of the two mammalian cells forming the IS are in both cis and trans configurations on these cells.

[0123] The term, a “multimerization domain” refers to a sequence of amino acids that promotes stable interaction of a polypeptide molecule with one or more additional polypeptide molecules, each containing a complementary multimerization domain (e.g. a first multimerization domain and a second multimerization domain), which can be the same or a different multimerization domain. The interactions between complementary multimerization domains, e.g. interaction between a first multimerization domain and a second multimerization domain, form a stable protein-protein interaction to produce a multimer of the polypeptide molecule with the additional polypeptide molecule. In some cases, the multimerization domain is the same and interacts with itself to form a stable protein-protein interaction between two polypeptide chains. Generally, a polypeptide is joined directly or indirectly to the multimerization domain. Exemplary multimerization domains include the immunoglobulin sequences or portions thereof, leucine zippers, hydrophobic regions, hydrophilic regions, and compatible protein-protein interaction domains. The multimerization domain, for example, can be an immunoglobulin constant region or domain, such as, for example, the Fc domain or portions thereof from IgG, including IgG1, IgG2, IgG3 or IgG4 subtypes, IgA, IgE, IgD and IgM and modified forms thereof.

[0124] The terms “nucleic acid” and “polynucleotide” are used interchangeably to refer to a polymer of nucleic acid residues (e.g., deoxyribonucleotides or ribonucleotides) in either single- or double-stranded form. Unless specifically limited, the terms encompass nucleic acids containing known analogues of natural nucleotides and that have similar binding properties to it and are metabolized in a manner similar to naturally-occurring nucleotides. Unless otherwise indicated, a particular nucleic acid sequence also implicitly encompasses conservatively modified variants thereof (e.g., degenerate codon substitutions) and complementary nucleotide sequences as well as the sequence explicitly indicated (a “reference sequence”). Specifically, degenerate codon substitutions may be achieved by generating sequences in which the third position of one or more selected (or all) codons is substituted with mixed-base and/or deoxyinosine residues. The term nucleic acid or polynucleotide encompasses cDNA or mRNA encoded by a gene.

[0125] The term “non-competitive binding” as used herein means the ability of a protein to specifically bind simultaneously to at least two cognate binding partners. Thus, the protein is able to bind to at least two different cognate binding partners at the same time, although the binding interaction need not be for the same duration such that, in some cases, the protein is specifically bound to only one of the cognate binding partners. In some embodiments, the binding occurs under specific binding conditions. In some embodiments, the simultaneous binding is such that binding of one cognate binding partner does not substantially inhibit simultaneous binding to a second cognate binding partner. In some embodiments, non-competitive binding means that binding a second cognate binding partner to its binding site on the protein does not displace the binding of a first cognate binding partner to its binding site on the protein. Methods of assessing non-competitive binding are well known in the art such as the method described in Perez de La Lastra et al., Immunology, 1999 April: 96(4): 663-670. In some cases, in non-competitive interactions, the first cognate binding partner specifically binds at an interaction site that does not overlap with the interaction site of the second cognate binding partner such that binding of the second cognate binding partner does not directly interfere with the binding of the first cognate binding partner. Thus, any effect on binding of the cognate binding partner by the binding of the second cognate binding partner is through a mechanism other than direct interference with the binding of the first cognate binding partner. For example, in the context of enzyme-substrate interactions, a non-competitive inhibitor binds to a site other than the active site of the enzyme. Non-competitive binding encompasses uncompetitive binding interactions in which a second cognate binding partner specifically binds at an interaction site that does not overlap with the binding of the first cognate binding partner but binds to the second interaction site only when the first interaction site is occupied by the first cognate binding partner.

[0126] The term “pharmaceutical composition” refers to a composition suitable for pharmaceutical use in a mammalian subject, often a human. A pharmaceutical composition typically comprises an effective amount of an active agent (e.g., an immunomodulatory polypeptide comprising a variant PD-L1 or engineered cells expressing a variant PD-L1 transmembrane immunomodulatory protein) and a carrier, excipient, or diluent. The carrier, excipient, or diluent is typically a pharmaceutically acceptable carrier, excipient or diluent, respectively.

[0127] The terms “polypeptide” and “protein” are used interchangeably herein and refer to a molecular chain of two or more amino acids linked through peptide bonds. The terms do not refer to a specific length of the product. Thus, “peptides,” and “oligopeptides,” are included within the definition of polypeptide. The terms include post-translational modifications of the polypeptide, for example, glycosylations, acetylations, phosphorylations and the like. The terms also include molecules in which one or more amino acid analogs or non-canonical or unnatural amino acids are included as can be synthesized, or expressed recombinantly using known protein engineering techniques. In addition, proteins can be derivatized.

[0128] The term “primary T-cell assay” as used herein refers to an in vitro assay to measure interferon-gamma (“IFN-gamma”) expression. A variety of such primary T-cell assays are known in the art. In a preferred embodiment, the assay used is an anti-CD3 coimmobilizaton assay. In this assay, primary T cells are stimulated by anti-CD3 immobilized with or without additional recombinant proteins. Culture supernatants are harvested at timepoints, usually 24-72 hours. In another embodiment, the assay used is the MLR. In this assay, primary T cells are stimulated with allogeneic APC. Culture supernatants are harvested at timepoints, usually 24-72 hours. Human IFN-gamma levels are measured in culture supernatants by standard ELISA techniques. Commercial kits are available from vendors and the assay is performed according to manufacturer's recommendation.

[0129] The term “purified” as applied to nucleic acids, such as encoding immunomodulatory proteins of the invention, generally denotes a nucleic acid or polypeptide that is substantially free from other components as determined by analytical techniques well known in the art (e.g., a purified polypeptide or polynucleotide forms a discrete band in an electrophoretic gel, chromatographic eluate, and/or a media subjected to density gradient centrifugation). For example, a nucleic acid or polypeptide that gives rise to essentially one band in an electrophoretic gel is “purified.” A purified nucleic acid or protein of the invention is at least about 50% pure, usually at least about 75%, 80%, 85%, 90%, 95%, 96%, 99% or more pure (e.g., percent by weight or on a molar basis).

[0130] The term “recombinant” indicates that the material (e.g., a nucleic acid or a polypeptide) has been artificially (i.e., non-naturally) altered by human intervention. The alteration can be performed on the material within, or removed from, its natural environment or state. For example, a “recombinant nucleic acid” is one that is made by recombining nucleic acids, e.g., during cloning, affinity modification, DNA shuffling or other well-known molecular biological procedures. A “recombinant DNA molecule,” is comprised of segments of DNA joined together by means of such molecular biological techniques. The term “recombinant protein” or “recombinant polypeptide” as used herein refers to a protein molecule which is expressed using a recombinant DNA molecule. A “recombinant host cell” is a cell that contains and/or expresses a recombinant nucleic acid or that is otherwise altered by genetic engineering, such as by introducing into the cell a nucleic acid molecule encoding a recombinant protein, such as a transmembrane immunomodulatory protein provided herein. Transcriptional control signals in eukaryotes comprise “promoter” and “enhancer” elements. Promoters and enhancers consist of short arrays of DNA sequences that interact specifically with cellular proteins involved in transcription. Promoter and enhancer elements have been isolated from a variety of eukaryotic sources including genes in yeast, insect and mammalian cells and viruses (analogous control elements, i.e., promoters, are also found in prokaryotes). The selection of a particular promoter and enhancer depends on what cell type is to be used to express the protein of interest. The terms “in operable combination,” “in operable order” and “operably linked” as used herein refer to the linkage of nucleic acid sequences in such a manner or orientation that a nucleic acid molecule capable of directing the transcription of a given gene and/or the synthesis of a desired protein molecule is produced.

[0131] The term “recombinant expression vector” as used herein refers to a DNA molecule containing a desired coding sequence and appropriate nucleic acid sequences necessary for the expression of the operably linked coding sequence in a particular host cell. Nucleic acid sequences necessary for expression in prokaryotes include a promoter, optionally an operator sequence, a ribosome binding site and possibly other sequences. Eukaryotic cells are known to utilize promoters, enhancers, and termination and polyadenylation signals. A secretory signal peptide sequence can also, optionally, be encoded by the recombinant expression vector, operably linked to the coding sequence for the recombinant protein, such as a recombinant fusion protein, so that the expressed fusion protein can be secreted by the recombinant host cell, for easier isolation of the fusion protein from the cell, if desired. The term includes the vector as a self-replicating nucleic acid structure as well as the vector incorporated into the genome of a host cell into which it has been introduced. Among the vectors are viral vectors, such as lentiviral vectors.

[0132] The term “selectivity” refers to the preference of a subject protein, or polypeptide, for specific binding of one substrate, such as one cognate binding partner, compared to specific binding for another substrate, such as a different cognate binding partner of the subject protein. Selectivity can be reflected as a ratio of the binding activity (e.g. binding affinity) of a subject protein and a first substrate, such as a first cognate binding partner, (e.g., K_{d1}) and the binding activity (e.g. binding affinity) of the same subject protein with a second cognate binding partner (e.g., K_{d2}).

[0133] The term “sequence identity” as used herein refers to the sequence identity between genes or proteins at the nucleotide or amino acid level, respectively. “Sequence identity” is a measure of identity between proteins at the amino acid level and a measure of identity between nucleic acids at nucleotide level. The protein sequence identity may be determined by comparing the amino acid sequence in a given position in each sequence when the sequences are aligned. Similarly, the nucleic acid sequence identity may be determined by comparing the nucleotide sequence in a given position in each sequence when the sequences are aligned. Methods for the alignment of sequences for comparison are well known in the art, such methods include GAP, BESTFIT, BLAST, FASTA and TFASTA. The BLAST algorithm calculates percent sequence identity and performs a statistical analysis of the similarity between the two sequences. The software for performing BLAST analysis is publicly available through the National Center for Biotechnology Information (NCBI) website.

[0134] The term “soluble” as used herein in reference to proteins, means that the protein is not a membrane protein. In general, a soluble protein contains only the extracellular domain of an IgSF family member receptor, or a portion thereof containing an IgSF domain or domains or specific-binding fragments thereof, but does not contain the transmembrane domain. In some cases, solubility of a protein can be improved by linkage or attachment, directly or indirectly via a linker, to an Fc domain, which, in some cases, also can improve the stability and/or half-life of the protein. In some aspects, a soluble protein is an Fc fusion protein.

[0135] The term “species” as used herein with respect to polypeptides or nucleic acids means an ensemble of molecules with identical or substantially identical sequences. Variation between polypeptides that are of the same species may occur owing to differences in post-translational modification such as glycosylation, phosphorylation, ubiquitination, nitrosylation, methylation, acetylation, and lipidation. Slightly truncated sequences of polypeptides that differ (or encode a difference) from the full length species at the amino-terminus or carboxy-terminus by no more than 1, 2, or 3 amino acid residues are considered to be of a single species. Such microheterogeneities are a common feature of manufactured proteins.

[0136] The term “specific binding fragment” as used herein in reference to a full-length wild-type mammalian PD-L1 polypeptide or an IgV or an IgC (e.g. IgC2) domain thereof, means a polypeptide having a subsequence of the full-length polypeptide or an IgV and/or IgC domain and that specifically binds in vitro and/or in vivo to a mammalian PD-1 and/or mammalian CD80 such as a human or murine PD-1 or CD80. In some embodiments, the specific binding fragment comprises an PD-L1 IgV or a PD-L1 IgC2 subsequence that is at least 60%, 70%, 75%, 80%, 85%, 90%, 95%, 96%, 97%, 98%, or 99% the sequence length of the full-length wild-type sequence or an IgV or an IgC (e.g. IgC2) sequence thereof. The specific binding fragment can be altered in sequence to form a variant PD-L1 of the invention.

[0137] The term “specifically binds” as used herein means the ability of a protein, under specific binding conditions, to bind to a target protein such that its affinity or avidity is at least 5 times as great, but optionally at least 10, 20, 30, 40, 50, 100, 250 or 500 times as great, or even at least 1000 times as great as the average affinity or avidity of the same protein to a collection of random peptides or polypeptides of sufficient statistical size. A specifically binding protein need not bind exclusively to a single target molecule but may specifically bind to a non-target molecule due to similarity in structural conformation between the target and non-target (e.g., paralogs or orthologs). Those of skill will recognize that specific binding to a molecule having the same function in a different species of animal (i.e., ortholog) or to a non-target molecule having a substantially similar epitope as the target molecule (e.g., paralog) is possible and does not detract from the specificity of binding which is determined relative to a statistically valid collection of unique non-targets (e.g., random polypeptides). Thus, a polypeptide of the invention may specifically bind to more than one distinct species of target molecule due to cross-reactivity. Solid-phase ELISA immunoassays, ForteBio Octet, or Biacore measurements can be used to determine specific binding between two proteins. Generally, interactions between two binding proteins have dissociation constants (K_{d}) less than 1×10⁻⁵ M, and often as low as 1×10⁻¹² M. In certain embodiments of the present disclosure, interactions between two binding proteins have dissociation constants of less than or less than about 1×10⁻⁶ M, 1×10⁻⁷ M, 1×10⁻⁸ M, 1×10⁻⁹ M, 1×10⁻¹⁰ M or 1×10⁻¹¹ M or less.

[0138] The terms “surface expresses” or “surface expression” in reference to a mammalian cell expressing a polypeptide means that the polypeptide is expressed as a membrane protein. In some embodiments, the membrane protein is a transmembrane protein.

[0139] As used herein, “synthetic,” with reference to, for example, a synthetic nucleic acid molecule or a synthetic gene or a synthetic peptide refers to a nucleic acid molecule or polypeptide molecule that is produced by recombinant methods and/or by chemical synthesis methods.

[0140] The term “targeting moiety” as used herein refers to a composition that is covalently or non-covalently attached to, or physically encapsulates, a polypeptide comprising a variant PD-L1 of the present invention. The targeting moiety has specific binding affinity for a desired counter-structure such as a cell surface receptor (e.g., PD-1), or a tumor antigen such as tumor specific antigen (TSA) or a tumor associated antigen (TAA) such as B7-H6. Typically, the desired counter-structure is localized on a specific tissue or cell-type. Targeting moieties include: antibodies, antigen binding fragment (Fab), variable fragment (Fv) containing V_{H} and V_{L}, the single chain variable fragment (scFv) containing V_{H} and V_{L} linked together in one chain, as well as other antibody V region fragments, such as Fab′, F(ab)₂, F(ab′)₂, dsFv diabody, nanobodies, soluble receptors, receptor ligands, affinity matured receptors or ligands, as well as small molecule (<500 dalton) compositions (e.g., specific binding receptor compositions). Targeting moieties can also be attached covalently or non-covalently to the lipid membrane of liposomes that encapsulate a polypeptide of the present invention.

[0141] The term “transmembrane protein” as used herein means a membrane protein that substantially or completely spans a lipid bilayer such as those lipid bilayers found in a biological membrane such as a mammalian cell, or in an artificial construct such as a liposome. The transmembrane protein comprises a transmembrane domain (“transmembrane domain”) by which it is integrated into the lipid bilayer and by which the integration is thermodynamically stable under physiological conditions. Transmembrane domains are generally predictable from their amino acid sequence via any number of commercially available bioinformatics software applications on the basis of their elevated hydrophobicity relative to regions of the protein that interact with aqueous environments (e.g., cytosol, extracellular fluid). A transmembrane domain is often a hydrophobic alpha helix that spans the membrane. A transmembrane protein can pass through the both layers of the lipid bilayer once or multiple times. A transmembrane protein includes the provided transmembrane immunomodulatory proteins described herein. In addition to the transmembrane domain, a transmembrane immunomodulatory protein of the invention further comprises an ectodomain and, in some embodiments, an endodomain.

[0142] The terms “treating,” “treatment,” or “therapy” of a disease or disorder as used herein mean slowing, stopping or reversing the disease or disorders progression, as evidenced by decreasing, cessation or elimination of either clinical or diagnostic symptoms, by administration of a therapeutic composition (e.g. containing an immunomodulatory protein or engineered cells) of the invention either alone or in combination with another compound as described herein. “Treating,” “treatment,” or “therapy” also means a decrease in the severity of symptoms in an acute or chronic disease or disorder or a decrease in the relapse rate as for example in the case of a relapsing or remitting autoimmune disease course or a decrease in inflammation in the case of an inflammatory aspect of an autoimmune disease. As used herein in the context of cancer, the terms “treatment” or, “inhibit,” “inhibiting” or “inhibition” of cancer refers to at least one of: a statistically significant decrease in the rate of tumor growth, a cessation of tumor growth, or a reduction in the size, mass, metabolic activity, or volume of the tumor, as measured by standard criteria such as, but not limited to, the Response Evaluation Criteria for Solid Tumors (RECIST), or a statistically significant increase in progression free survival (PFS) or overall survival (OS). “Preventing,” “prophylaxis,” or “prevention” of a disease or disorder as used in the context of this invention refers to the administration of an immunomodulatory polypeptide or engineered cells of the invention, either alone or in combination with another compound, to prevent the occurrence or onset of a disease or disorder or some or all of the symptoms of a disease or disorder or to lessen the likelihood of the onset of a disease or disorder.

[0143] The term “tumor specific antigen” or “TSA” as used herein refers to a counter-structure that is present primarily on tumor cells of a mammalian subject but generally not found on normal cells of the mammalian subject. A tumor specific antigen need not be exclusive to tumor cells but the percentage of cells of a particular mammal that have the tumor specific antigen is sufficiently high or the levels of the tumor specific antigen on the surface of the tumor are sufficiently high such that it can be targeted by anti-tumor therapeutics, such as immunomodulatory polypeptides of the invention, and provide prevention or treatment of the mammal from the effects of the tumor. In some embodiments, in a random statistical sample of cells from a mammal with a tumor, at least 50% of the cells displaying a TSA are cancerous. In other embodiments, at least 60%, 70%, 80%, 85%, 90%, 95%, or 99% of the cells displaying a TSA are cancerous.

[0144] The term “variant” (also “modified” or mutant”) as used in reference to a variant PD-L1 means a PD-L1, such as a mammalian (e.g., human or murine) PD-L1 created by human intervention. The variant PD-L1 is a polypeptide having an altered amino acid sequence, relative to an unmodified or wild-type PD-L1. The variant PD-L1 is a polypeptide which differs from a wild-type PD-L1 isoform sequence by one or more amino acid substitutions, deletions, additions, or combinations thereof. For purposes herein, the variant PD-L1 contains at least one affinity modified domain, whereby one or more of the amino acid differences occurs in an IgSF domain (e.g. IgV domain or ECD). A variant PD-L1 can contain 1, 2, 3, 4, 5, 6, 7, 8, 9, 10, 11, 12, 13, 14, 15, 16, 17, 18, 19, 20, 21, 22, 23, 24, 25, 26, 27, 28, 29, 30 or more amino acid differences, such as amino acid substitutions. A variant PD-L1 polypeptide generally exhibits at least 50%, 60%, 70%, 80%, 85%, 86%, 87%, 88%, 89%, 90%, 91%, 92%, 93%, 94%, 95%, 96%, 97%, 98%, 99% or more sequence identity to a corresponding wild-type or unmodified PD-L1, such as to the sequence of SEQ ID NO:3, a mature sequence thereof (lacking the signal sequence) or a portion thereof containing the extracellular domain or an IgSF domain thereof. In some embodiments, a variant PD-L1 polypeptide exhibits at least 50%, 60%, 70%, 80%, 85%, 86%, 87%, 88%, 89%, 90%, 91%, 92%, 93%, 94%, 95%, 96%, 97%, 98%, 99% or more sequence identity to a corresponding wild-type or unmodified PD-L1 comprising the sequence set forth in SEQ ID NO:30 or 1728 or SEQ ID NO: 55 or 309. Non-naturally occurring amino acids as well as naturally occurring amino acids are included within the scope of permissible substitutions or additions. A variant PD-L1 is not limited to any particular method of making and includes, for example, de novo chemical synthesis, de novo recombinant DNA techniques, or combinations thereof. A variant PD-L1 of the invention specifically binds to at least one or more of PD-1 or CD80 of a mammalian species. In some embodiments, the altered amino acid sequence results in an altered (i.e., increased or decreased) binding affinity or avidity to PD-1 and/or CD80 compared to the wild-type or unmodified PD-L1 protein. An increase or decrease in binding affinity or avidity can be determined using well known binding assays such as flow cytometry. Larsen et al., American Journal of Transplantation, Vol 5: 443-453 (2005). See also, Linsley et al., Immunity, Vol 1(9): 793-801 (1994). An increase in variant PD-L1 binding affinity or avidity to PD-1 and/or CD80 is to a value at least 5% greater than that of the wild-type or unmodified PD-L1 and in some embodiments, at least 10%, 15%, 20%, 30%, 40%, 50%, 100% greater than that of the wild-type or unmodified PD-L1 control value. A decrease in PD-L1 binding affinity or avidity to PD-1 and/or CD80 is to a value no greater than 95% of the wild-type or unmodified control values, and in some embodiments no greater than 80%, 70% 60%, 50%, 40%, 30%, 20%, 10%, 5%, or no detectable binding affinity or avidity of the wild-type or unmodified control values. A variant PD-L1 is altered in primary amino acid sequence by substitution, addition, or deletion of amino acid residues. The term “variant” in the context of variant PD-L1 is not to be construed as imposing any condition for any particular starting composition or method by which the variant PD-L1 is created. A variant PD-L1 can, for example, be generated starting from wild type mammalian PD-L1 sequence information, then modeled in silico for binding to PD-1 and/or CD80, and finally recombinantly or chemically synthesized to yield a variant PD-L1 of the present invention. In but one alternative example, a variant PD-L1 can be created by site-directed mutagenesis of a wild-type PD-L1. Thus, variant PD-L1 denotes a composition and not necessarily a product produced by any given process. A variety of techniques including recombinant methods, chemical synthesis, or combinations thereof, may be employed.

[0145] The term “wild-type” or “natural” or “native” as used herein is used in connection with biological materials such as nucleic acid molecules, proteins (e.g., PD-L1), IgSF members, host cells, and the like, refers to those which are found in nature and not modified by human intervention.

### II. VARIANT PD-L1 POLYPEPTIDES

[0146] Provided herein are variant PD-L1 polypeptides that exhibit altered (increased or decreased) binding activity or affinity for one or more of a PD-L1 cognate binding partner. In some embodiments, the PD-L1 cognate binding partner is PD-1 or CD80. In some embodiments, the PD-L1 cognate binding partner is PD-1. In some embodiments, the variant PD-L1 polypeptide contains one or more amino acids modifications, such as one or more substitutions (alternatively, “mutations” or “replacements”), deletions or addition, in an immunoglobulin superfamily (IgSF) domain (IgD) relative to a wild-type or unmodified PD-L1 polypeptide or a portion of a wild-type or unmodified PD-L1 containing the IgD or a specific binding fragment thereof. Thus, a provided variant PD-L1 polypeptide is or comprises a variant IgD (hereinafter called “vIgD”) in which the one or more amino acid modifications (e.g. substitutions) is in an IgD.

[0147] In some embodiments, the IgD comprises an IgV domain or an IgC (e.g. IgC2) domain or specific binding fragment of the IgV domain or the IgC (e.g. IgC2) domain, or combinations thereof. In some embodiments, the IgD can be an IgV only, the combination of the IgV and IgC, including the entire extracellular domain (ECD), or any combination of Ig domains of PD-L1. Table 2 provides exemplary residues that correspond to IgV or IgC regions of PD-L1. In some embodiments, the variant PD-L1 polypeptide contains an IgV domain or an IgC domain or specific binding fragments thereof in which the at least one amino acid modifications (e.g. substitutions) is in the IgV domain or IgC domain or a specific binding fragment thereof. In some embodiments, the variant PD-L1 polypeptide contains an IgV domain or specific binding fragments thereof in which the at least one of the amino acid modifications (e.g. substitutions) is in the IgV domain or a specific binding fragment thereof. In some embodiments, by virtue of the altered binding activity or affinity, the altered IgV domain or IgC (e.g. IgC2) domain is an affinity-modified IgSF domain.

[0148] In some embodiments, the variant is modified in one more IgSF domains relative to the sequence of an unmodified PD-L1 sequence. In some embodiments, the unmodified PD-L1 sequence is a wild-type PD-L1. In some embodiments, the unmodified or wild-type PD-L1 has the sequence of a native PD-L1 or an ortholog thereof. In some embodiments, the unmodified PD-L1 is or comprises the extracellular domain (ECD) of PD-L1 or a portion thereof containing one or more IgSF domain (see Table 2). In some embodiments, the extracellular domain of an unmodified or wild-type PD-L1 polypeptide comprises an IgV domain and an IgC (e.g. IgC2) domain or domains. However, the variant PD-L1 polypeptide need not comprise both the IgV domain and the IgC (e.g. IgC2) domain or domains. In some embodiments, the variant PD-L1 polypeptide comprises or consists essentially of the IgV domain or a specific binding fragment thereof. In some embodiments, the variant PD-L1 polypeptide comprises or consists essentially of one or both of the IgC (e.g. IgC2) domain or specific binding fragments thereof. In some embodiments, the variant PD-L1 polypeptide comprises or consists essentially of only one of the IgC (e.g. IgC2) domain or a specific binding fragment thereof. In some embodiments, the variant PD-L1 polypeptide comprises the IgV domain or a specific binding fragment thereof, and the first and second IgC (e.g. IgC2) domains or specific binding fragment thereof. In some embodiments, the variant PD-L1 is soluble and lacks a transmembrane domain. In some embodiments, the variant PD-L1 further comprises a transmembrane domain and, in some cases, also a cytoplasmic domain.

[0149] In some embodiments, the wild-type or unmodified PD-L1 sequence is a mammalian PD-L1 sequence. In some embodiments, the wild-type or unmodified PD-L1 sequence can be a mammalian PD-L1 that includes, but is not limited to, human, mouse, cynomolgus monkey, or rat. In some embodiments, the wild-type or unmodified PD-L1 sequence is human.

[0150] In some embodiments, the wild-type or unmodified PD-L1 sequence has (i) the sequence of amino acids set forth in SEQ ID NO:3 or a mature form thereof lacking the signal sequence, (ii) a sequence of amino acids that exhibits at least 85%, 86%, 87%, 88%, 89%, 90%, 91%, 92%, 93%, 94%, 95%, 96%, 97%, 98%, 99% or more sequence identity to SEQ ID NO:3 or the mature form thereof, or (iii) is a portion of (i) or (ii) containing an IgV domain or IgC (e.g. IgC2) domain or specific binding fragments thereof.

[0151] In some embodiments, the wild-type or unmodified PD-L1 sequence is or comprises an extracellular domain of the PD-L1 or a portion thereof. In some embodiments, the unmodified or wild-type PD-L1 polypeptide comprises the amino acid sequence set forth in SEQ ID NO: 30 or 1728, or an ortholog thereof. In some cases, the unmodified or wild-type PD-L1 polypeptide can comprise (i) the sequence of amino acids set forth in SEQ ID NO: 30 or 1728, (ii) a sequence of amino acids that has at least about 85%, 86%, 87%, 88%, 89%, 90%, 91%, 92%, 93%, 94%, 95%, 96%, 97%, 98%, 99% sequence identity to SEQ ID NO: 30 or 1728, or (iii) is a specific binding fragment of the sequence of (i) or (ii) comprising an IgV domain or an IgC (e.g. IgC2) domain.

[0152] In some embodiments, the wild-type or unmodified PD-L1 polypeptide comprises an IgV domain or an IgC (e.g. IgC2) domain or domains, or a specific binding fragment thereof. In some embodiments, the IgV domain of the wild-type or unmodified PD-L1 polypeptide comprises the amino acid sequence set forth in SEQ ID NO: 55 or 309 (corresponding to amino acid residues 24-130 of SEQ ID NO: 3), or an ortholog thereof. For example, the IgV domain of the unmodified or wild-type PD-L1 polypeptide can contain (i) the sequence of amino acids set forth in SEQ ID NO: 55 or 309, (ii) a sequence of amino acids that has at least about 85%, 86%, 87%, 88%, 89%, 90%, 91%, 92%, 93%, 94%, 95%, 96%, 97%, 98%, 99% sequence identity to SEQ ID NO: 55 or 309, or (iii) a specific binding fragment of the sequence of (i) or (ii). In some embodiments, the wild-type or unmodified IgV domain is capable of binding one or more PD-L1 cognate binding proteins, such as one or more of PD-1 or CD80.

[0153] In some embodiments, a first IgC2 domain of the wild-type or unmodified PD-L1 polypeptide comprises the amino acid sequence set forth as residues 133-225 of SEQ ID NO: 3, or an ortholog thereof. For example, an IgC2 domain of the unmodified or wild-type PD-L1 polypeptide can contain (i) the sequence of amino acids set forth as residues 133-225 of SEQ ID NO: 3, (ii) a sequence of amino acids that has at least about 85%, 86%, 87%, 88%, 89%, 90%, 91%, 92%, 93%, 94%, 95%, 96%, 97%, 98%, 99% sequence identity to residues 133-225 of SEQ ID NO: 3, or (iii) a specific binding fragment of (i) or (ii). In some embodiments, the wild-type or unmodified IgC domain is capable of binding one or more PD-L1 cognate binding proteins.

[0154] In some embodiments, the wild-type or unmodified PD-L1 polypeptide contains a specific binding fragment of PD-L1, such as a specific binding fragment of the IgV domain or the IgC (e.g. IgC2) domain. In some embodiments the specific binding fragment can bind PD-1 and/or CD80. The specific binding fragment can have an amino acid length of at least 50 amino acids, such as at least 60, 70, 80, 90, 100, or 110 amino acids. In some embodiments, a specific binding fragment of the IgV domain contains an amino acid sequence that is at least about 85%, 86%, 87%, 88%, 89%, 90%, 91%, 92%, 93%, 94%, 95%, 96%, 97%, 98%, 99% of the length of the IgV domain set forth as amino acids 24-130 of SEQ ID NO: 3. In some embodiments, a specific binding fragment of an IgC (e.g. IgC2) domain comprises an amino acid sequence that is at least about 85%, 86%, 87%, 88%, 89%, 90%, 91%, 92%, 93%, 94%, 95%, 96%, 97%, 98%, 99% of the length of the IgC domain set forth as amino acids 133-225 of SEQ ID NO: 3.

[0155] In some embodiments, the variant PD-L1 polypeptide comprises the ECD domain or a portion thereof comprising one or more affinity modified IgSF domains. In some embodiments, the variant PD-L1 polypeptides can comprise an IgV domain or an IgC (e.g. IgC2) domain or domains, or a specific binding fragment of the IgV domain or a specific binding fragment of the IgC (e.g. IgC2) domain or domains in which one or more of the IgSF domains (IgV or IgC) contains the one or more amino acid modifications (e.g. substitutions). In some embodiments, the variant PD-L1 polypeptides can comprise an IgV domain and an IgC (e.g. IgC2) domain or domains, or a specific binding fragment of the IgV domain and a specific binding fragment of the IgC (e.g. IgC2) domain or domains, in which at least one of the IgV or IgC domain contains the amino acid modification(s) (e.g. substitution(s)). In some embodiments, the variant PD-L1 polypeptide comprises a full-length IgV domain. In some embodiments, the variant PD-L1 polypeptide comprises a full-length IgC (e.g. IgC2) domain or domains. In some embodiments, the variant PD-L1 polypeptide comprises a specific binding fragment of the IgV domain. In some embodiments, the variant PD-L1 polypeptide comprises a specific binding fragment of the IgC (e.g. IgC2) domain or domains. In some embodiments, the variant PD-L1 polypeptide comprises a full-length IgV domain and a full-length IgC (e.g. IgC2) domain or domains. In some embodiments, the variant PD-L1 polypeptide comprises a full-length IgV domain and a specific binding fragment of an IgC (e.g. IgC2) domain or domains. In some embodiments, the variant PD-L1 polypeptide comprises a specific binding fragment of an IgV domain and a full-length IgC (e.g. IgC2) domain or domains. In some embodiments, the variant PD-L1 polypeptide comprises a specific binding fragment of an IgV domain and a specific binding fragment of an IgC (e.g. IgC2) domain or domains.

[0156] In any of such embodiments, the one or more amino acid modifications (e.g. substitutions) of the variant PD-L1 polypeptides can be located in any one or more of the PD-L1 polypeptide IgSF domains. For example, in some embodiments, one or more amino acid modifications (e.g. substitutions) are located in the extracellular domain of the variant PD-L1 polypeptide. In some embodiments, one or more amino acid modifications (e.g. substitutions) are located in the IgV domain or specific binding fragment of the IgV domain. In some embodiments, one or more amino acid modifications (e.g. substitutions) are located in an IgC (e.g. IgC2) domain or specific binding fragment of an IgC (e.g. IgC2) domain.

[0157] Generally, each of the various attributes of polypeptides are separately disclosed below (e.g., soluble and membrane bound polypeptides, affinity of PD-L1 for PD-1 and CD80, number of variations per polypeptide chain, number of linked polypeptide chains, the number and nature of amino acid alterations per variant PD-L1, etc.). However, as will be clear to the skilled artisan, any particular polypeptide can comprise a combination of these independent attributes. It is understood that reference to amino acids, including to a specific sequence set forth as a SEQ ID NO used to describe domain organization of an IgSF domain are for illustrative purposes and are not meant to limit the scope of the embodiments provided. It is understood that polypeptides and the description of domains thereof are theoretically derived based on homology analysis and alignments with similar molecules. Thus, the exact locus can vary, and is not necessarily the same for each protein. Hence, the specific IgSF domain, such as specific IgV domain or IgC domain, can be several amino acids (such as one, two, three or four) longer or shorter.

[0158] Further, various embodiments of the invention as discussed below are frequently provided within the meaning of a defined term as disclosed above. The embodiments described in a particular definition are therefore to be interpreted as being incorporated by reference when the defined term is utilized in discussing the various aspects and attributes described herein. Thus, the headings, the order of presentation of the various aspects and embodiments, and the separate disclosure of each independent attribute is not meant to be a limitation to the scope of the present disclosure.

[0159] A. Exemplary Modifications

[0160] Provided herein are variant PD-L1 polypeptides containing at least one affinity-modified IgSF domain (e.g., ECD, IgV, or IgC) or a specific binding fragment thereof relative to an IgSF domain contained in a wild-type or unmodified PD-L1 polypeptide such that the variant PD-L1 polypeptide exhibits altered (increased or decreased) binding activity or affinity for one or more ligands PD-1 or CD80 compared to a wild-type or unmodified PD-L1 polypeptide. In some embodiments, a variant PD-L1 polypeptide has a binding affinity for PD-1 and/or CD80 that differs from that of a wild-type or unmodified PD-L1 polypeptide control sequence as determined by, for example, solid-phase ELISA immunoassays, flow cytometry, ForteBio Octet or Biacore assays. In some embodiments, the variant PD-L1 polypeptide has an increased binding affinity for PD-1 and/or CD80. In some embodiments, the variant PD-L1 polypeptide has a decreased binding affinity for PD-1 and/or CD80, relative to a wild-type or unmodified PD-L1 polypeptide. The PD-1 and/or the CD80 can be a mammalian protein, such as a human protein or a murine protein.

[0161] Binding affinities for each of the cognate binding partners are independent; that is, in some embodiments, a variant PD-L1 polypeptide has an increased binding affinity for one or both of PD-1 and/or CD80, and a decreased binding affinity for one or both of PD-1 and CD80, relative to a wild-type or unmodified PD-L1 polypeptide.

[0162] In some embodiments, the variant PD-L1 polypeptide has an increased binding affinity for PD-1, relative to a wild-type or unmodified PD-L1 polypeptide. In some embodiments, the variant PD-L1 polypeptide has an increased binding affinity for CD80, relative to a wild-type or unmodified PD-L1 polypeptide. In some embodiments, the variant PD-L1 polypeptide has a decreased binding affinity for PD-1, relative to a wild-type or unmodified PD-L1 polypeptide. In some embodiments, the variant PD-L1 polypeptide has a decreased binding affinity for CD80, relative to a wild-type or unmodified PD-L1 polypeptide.

[0163] In some embodiments, the variant PD-L1 polypeptide has an increased binding affinity for PD-1 and CD80, relative to a wild-type or unmodified PD-L1 polypeptide. In some embodiments, the variant PD-L1 polypeptide has an increased binding affinity for PD-1 and a decreased binding affinity for CD80, relative to a wild-type or unmodified PD-L1 polypeptide. In some embodiments, the variant PD-L1 polypeptide has a decreased binding affinity for PD-1 and CD80, relative to a wild-type or unmodified PD-L1 polypeptide. In some embodiments, the variant PD-L1 polypeptide has a decreased binding affinity for PD-1 and an increased binding affinity for CD80, relative to a wild-type or unmodified PD-L1 polypeptide.

[0164] In some embodiments, a variant PD-L1 polypeptide with increased or greater binding affinity to PD-1 and/or CD80 will have an increase in binding affinity relative to the wild-type or unmodified PD-L1 polypeptide control of at least about 5%, such as at least about 10%, 15%, 20%, 25%, 35%, or 50% for the PD-1 and/or CD80. In some embodiments, the increase in binding affinity relative to the wild-type or unmodified PD-L1 polypeptide is more than 1.2-fold, 1.5-fold, 2-fold, 3-fold, 4-fold, 5-fold, 6-fold, 7-fold, 8-fold, 9-fold, 10-fold, 20-fold, 30-fold 40-fold or 50-fold. In such examples, the wild-type or unmodified PD-L1 polypeptide has the same sequence as the variant PD-L1 polypeptide except that it does not contain the one or more amino acid modifications (e.g. substitutions).

[0165] In some embodiments, a variant PD-L1 polypeptide with reduced or decreased binding affinity to PD-1 and/or CD80 will have decrease in binding affinity relative to the wild-type or unmodified PD-L1 polypeptide control of at least 5%, such as at least about 10%, 15%, 20%, 30%, 40%, 50%, 60%, 70%, 80%, 90% or more for the PD-1 and/or CD80. In some embodiments, the decrease in binding affinity relative to the wild-type or unmodified PD-L1 polypeptide is more than 1.2-fold, 1.5-fold, 2-fold, 3-fold, 4-fold, 5-fold, 6-fold, 7-fold, 8-fold, 9-fold, 10-fold, 20-fold, 30-fold 40-fold or 50-fold. In such examples, the wild-type or unmodified PD-L1 polypeptide has the same sequence as the variant PD-L1 polypeptide except that it does not contain the one or more amino acid modifications (e.g. substitutions).

[0166] In some embodiments, the equilibrium dissociation constant (K_{d}) of any of the foregoing embodiments to PD-1 and/or CD80 can be less than 1×10⁻⁵ M, 1×10⁻⁶ M, 1×10⁻⁷ M, 1×10⁻⁸ M, 1×10⁻⁹ M, 1×10⁻¹⁰ M or 1×10⁻¹¹ M, or 1×10⁻¹² M or less.

[0167] The wild-type or unmodified PD-L1 sequence does not necessarily have to be used as a starting composition to generate variant PD-L1 polypeptides described herein. Therefore, use of the term “modification”, such as “substitution”, does not imply that the present embodiments are limited to a particular method of making variant PD-L1 polypeptides. Variant PD-L1 polypeptides can be made, for example, by de novo peptide synthesis and thus does not necessarily require a modification, such as a “substitution”, in the sense of altering a codon to encode for the modification, e.g. substitution. This principle also extends to the terms “addition” and “deletion” of an amino acid residue which likewise do not imply a particular method of making. The means by which the variant PD-L1 polypeptides are designed or created is not limited to any particular method. In some embodiments, however, a wild-type or unmodified PD-L1 encoding nucleic acid is mutagenized from wild-type or unmodified PD-L1 genetic material and screened for desired specific binding affinity and/or induction of IFN-gamma expression or other functional activity. In some embodiments, a variant PD-L1 polypeptide is synthesized de novo utilizing protein or nucleic acid sequences available at any number of publicly available databases and then subsequently screened. The National Center for Biotechnology Information provides such information and its website is publicly accessible via the internet as is the UniProtKB database as discussed previously.

[0168] Unless stated otherwise, as indicated throughout the present disclosure, the amino acid modification(s) are designated by amino acid position number corresponding to the numbering of positions of the unmodified ECD sequence set forth in SEQ ID NO:30 or 1728 or also, where applicable, the unmodified IgV sequence set forth in SEQ ID NO: 309 (containing residues 1-114, respectively, of SEQ ID NO:30) as follows:

(SEQ ID NO: 30)
FTVTVPKDLYVVEYGSNMTIECKFPVEKQLDLAALIVYWEMEDKNHIQFV
HGEEDLKVQHSSYRQRARLLKDQLSLGNAALQITDVKLQDAGVYRCMISY
GGADYKRITVKVNAPYNKINQRILVVDPVTSEHELTCQAEGYPKAEVIWT
SSDHQVLSGKTTTTNSKREEKLFNVTSTLRINTTTNEIFYCTFRRLDPEE
NHTAELVIPELPLAHPPNER
(SEQ ID NO: 1728)
[sequence omitted]
(SEQ ID NO: 309)
FTVTVPKDLYVVEYGSNMTIECKFPVEKQLDLAALIVYWEMEDKNIIQFV
HGEEDLKVQHSSYRQRARLL KDQLSLGNAALQITDVKLQDAGVYRCMIS
YGGADYKRITVKVNA

[0169] Modifications provided herein can be in an unmodified PD-L1 polypeptide set forth in SEQ ID NO:30, 309 or 1728. In some cases, modifications also can be in an unmodified IgV set forth in SEQ ID NO:55. In some embodiments, the unmodified PD-L1 polypeptide has 85%, 85%, 87%, 88%, 89%, 90%, 91%, 92%, 93%, 94%, 95%, 96%, 97%, 98%, 99% sequence identity to SEQ ID NO: 30, 55, 309 or 1728.

(SEQ ID NO: 55)
PKDLYVVEYGSNMTIECKFPVEKQLDLAALIVYWEMEDKNIIQFVHGEED
LKVQHSSYRQRARLL KDQLSLGNAALQITDVKLQDAGVYRCMISY
GGADYKRITVKV

[0170] It is within the level of a skilled artisan to identify the corresponding position of a modification, e.g. amino acid substitution, in a PD-L1 polypeptide, including portion thereof containing an IgSF domain (e.g. ECD or IgV) thereof, such as by alignment of a reference sequence with SEQ ID NO:30, or SEQ ID NO:309. In the listing of modifications throughout this disclosure, the amino acid position is indicated in the middle, with the corresponding unmodified (e.g. wild-type) amino acid listed before the number and the identified variant amino acid substitution listed after the number. If the modification is a deletion of the position a “del” is indicated and if the modification is an insertion at the position an “ins” is indicated. In some cases, an insertion is listed with the amino acid position indicated in the middle, with the corresponding unmodified (e.g. wild-type) amino acid listed before and after the number and the identified variant amino acid insertion listed after the unmodified (e.g. wild-type) amino acid.

[0171] In some embodiments, the variant PD-L1 polypeptide has one or more amino acid modifications, e.g. substitutions, in a wild-type or unmodified PD-L1 sequence. The one or more amino acid modifications, e.g. substitutions, can be in the ectodomain (extracellular domain) of the wild-type or unmodified PD-L1 sequence. In some embodiments, the one or more amino acid modifications, e.g. substitutions, are in the IgV domain or specific binding fragment thereof. In some embodiments, the one or more amino acid modifications, e.g. substitutions, are in the ECD domain or specific binding fragment thereof. In some embodiments, the one or more amino acid modifications, e.g. substitutions, are in an IgC (e.g. IgC2) domain or specific binding fragment thereof. In some embodiments of the variant PD-L1 polypeptide, some of the one or more amino acid modifications, e.g. substitutions, are in the IgV domain or a specific binding fragment thereof, and some of the one or more amino acid modifications, e.g. substitutions, are in an IgC domain or domains (e.g. IgC2) or a specific binding fragment thereof.

[0172] In some embodiments, the variant PD-L1 polypeptide has up to 1, 2, 3, 4, 5, 6, 7, 8, 9, 10, 11, 12, 13, 14, 15, 16, 17, 18, 19, or 20 amino acid modifications, e.g. substitutions. The modifications (e.g. substitutions) can be in the IgV domain or the IgC (e.g. IgC2) domain or domains. In some embodiments, the variant PD-L1 polypeptide has up to 1, 2, 3, 4, 5, 6, 7, 8, 9, 10, 11, 12, 13, 14, 15, 16, 17, 18, 19, or 20 amino acid modifications, e.g. substitutions, in the IgV domain or specific binding fragment thereof. In some embodiments, the variant PD-L1 polypeptide has up to 1, 2, 3, 4, 5, 6, 7, 8, 9, 10, 11, 12, 13, 14, 15, 16, 17, 18, 19, or 20 amino acid modifications, e.g. substitutions, in the IgC (e.g. IgC2) domain or domains or specific binding fragment thereof. In some embodiments, the variant PD-L1 polypeptide has at least about 85%, 86%, 86%, 88%, 89%, 90%, 91%, 92%, 93%, 94%, 95%, 96%, 97%, 98%, or 99% sequence identity with the wild-type or unmodified PD-L1 polypeptide or specific binding fragment thereof, such as with the amino acid sequence of SEQ ID NO: 30, 1728, 55 or 309.

[0173] In some embodiments, the variant PD-L1 polypeptide has one or more amino acid modifications, e.g. substitutions, in an unmodified PD-L1 or specific binding fragment thereof corresponding to position(s) 6, 10, 11, 14, 15, 16, 17, 18, 19, 20, 22, 23, 26, 27, 28, 33, 35, 36, 40, 41, 43, 44, 45, 46, 47, 49, 50, 51, 52, 53, 54, 55, 56, 57, 58, 60, 64, 65, 68, 71, 72, 73, 74, 75, 78, 79, 83, 85, 89, 90, 93, 97, 98, 99, 101, 102, 103, 104, 106, 110, 111, 112, 113, 117, 119, 120, 121, 124, 129, 130, 131, 134, 137, 138, 144, 148, 149, 150, 155, 158, 160, 163, 165, 167, 170, 171, 173, 175, 176, 177, 179, 180, 183, 185, 188, 189, 192, 193, 194, 195, 196, 197, 198, 199, 200, 201, 202, 203, 204, 206, 207, 213, or 221, with reference to positions set forth in SEQ ID NO: 30 or 1728. In some embodiments, such variant PD-L1 polypeptides exhibit altered binding affinity to one or more of PD-1 and/or CD80 compared to the wild-type or unmodified PD-L1 polypeptide. For example, in some embodiments, the variant PD-L1 polypeptide exhibits increased binding affinity to PD-1 and/or CD80 compared to a wild-type or unmodified PD-L1 polypeptide. In some embodiments, the variant PD-L1 polypeptide exhibits decreased binding affinity to PD-1 or CD80 compared to a wild-type or unmodified PD-L1 polypeptide.

[0174] In some embodiments, the variant PD-L1 polypeptide has one or more amino acid modification, e.g. amino acid substitution, selected from P6S, Y10F, V11A, V11E, Y14S, G15A, S16G, N17D, M18I, M18T, M18V, T19A, T19I, I20L, C22R, K23E, K23N, K23R, E26A, E27D, E27G, K28E, K28I, K28N, K28R, A33D, L35P, I36S, I36T, E40G, M41K, M41V, D43G, D43V, K44E, N45D, N45I, N45T, I46V, I47T, F49S, V50A, H51N, H51R, H51Y, G52R, G52V, E53G, E53V, E54G, D55G, D55N, D55S, D55V, L56Q, K57E, K57R, V58A, V58D, H60R, R64S, Q65L, R68L, K71E, D72G, Q73R, L74P, S75P, N78I, N78S, A79T, I83T, D85E, Q89R, D90G, V93E, M97I, M97K, M97L, I98L, I98T, I98V, S99G, G101D, G101G-ins (G101GG), G102D, A103V, D104G, K106E, K106R, V110M, K111E, K111T, V112A, N113Y, N117S, I119T, N120S, Q121L, L124S, V129A, V129D, T130A, S131F, E134G, C137R, Q138R, K144E, K144Q, I148V, W149R, T150A, Q155H, S158G, K160M, T163I, K163N, N165Y, K167R, K167T, E170G, K171R, F173I, F173L, K173Y, V175A, T176N, S177C, L179P, R180S, T183A, T183I, T185A, I188V, F189L, F189S, T192S, F193S, R194G, R194W, R195G, R195S, R195T, L196S, D197G, P198S, P198T, E199G, E200K, E200N, N201D, N201Y, H202Q, T203A, A204T, L206F, V207A, L213P, OR T221L or a conservative amino acid substitution thereof. A conservative amino acid substitution is any amino acid that falls in the same class of amino acids as the substituted amino acids, other than the wild-type or unmodified amino acid. The classes of amino acids are aliphatic (glycine, alanine, valine, leucine, and isoleucine), hydroxyl or sulfur-containing (serine, cysteine, threonine, and methionine), cyclic (proline), aromatic (phenylalanine, tyrosine, tryptophan), basic (histidine, lysine, and arginine), and acidic/amide (aspartate, glutamate, asparagine, and glutamine).

[0175] In some embodiments, the variant PD-L1 polypeptide has two or more amino acid modifications, e.g. amino acid substitutions, selected from P6S, Y10F, V11A, V11E, Y14S, G15A, S16G, N17D, M18I, M18T, M18V, T19A, T19I, I20L, C22R, K23E, K23N, K23R, E26A, E27D, E27G, K28E, K28I, K28N, K28R, A33D, L35P, I36S, I36T, E40G, M41K, M41V, D43G, D43V, K44E, N45D, N45I, N45T, I46V, I47T, F49S, V50A, H51N, H51R, H51Y, G52R, G52V, E53G, E53V, E54G, D55G, D55N, D55S, D55V, L56Q, K57E, K57R, V58A, V58D, H60R, R64S, Q65L, R68L, K71E, D72G, Q73R, L74P, S75P, N78I, N78S, A79T, I83T, D85E, Q89R, D90G, V93E, M97I, M97K, M97L, I98L, I98T, I98V, S99G, G101D, G101G-ins (G101GG), G102D, A103V, D104G, K106E, K106R, V110M, K111E, K111T, V112A, N113Y, N117S, I119T, N120S, Q121L, L124S, V129A, V129D, T130A, S131F, E134G, C137R, Q138R, K144E, K144Q, I148V, W149R, T150A, Q155H, S158G, K160M, T163I, K163N, N165Y, K167R, K167T, E170G, K171R, F173I, F173L, K173Y, V175A, S177C, L179P, R180S, T183A, T183I, T185A, I188V, F189L, F189S, T192S, F193S, R194G, R194W, R195G, R195S, R195T, L196S, D197G, P198S, P198T, E199G, E200K, E200N, N201D, N201Y, H202Q, T203A, A204T, L206F, V207A, L213P, or T221L.

[0176] In some embodiments, the amino acid modifications, e.g. amino acid substitutions, include K28N/M41V/N45T/H51N/K57E, I20L/I36T/N45D/I47T, I20L/M41K/K44E, P6S/N45T/N78I/I83T, N78I, M41K/N78I, N45T/N78I, I20L/N45T, N45T, M41K, I20L/I36T/N45D, N17D/N45T/V50A/D72G, I20L/F49S, N45T/V50A, I20L/N45T/N78I, I20L/N45T/V50A, M41V/N45T, M41K/N45T, A33D/S75P/D85E, M18I/M41K/D43G/H51R/N78I, V11E/I20L/I36T/N45D/H60R/S75P, A33D/V50A, S16G/A33D/K71E/S75P, E27G/N45T/M97I, E27G/N45T/K57R, A33D/E53V, D43G/N45D/V58A, E40G/D43V/N45T/V50A, Y14S/K28E/N45T A33D/N78S, A33D/N78I, A33D/N45T, A33D/N45T/N78I, E27G/N45T/V50A, N45T/V50A/N78S, I20L/N45T/V110M, I20L/I36T/N45T/V50A, N45T/L74P/S75P, N45T/S75P, S75P/K106R, S75P, A33D/S75P, A33D/S75P/D104G, A33D/S75P, I20L/E27G/N45T/V50A, I20L/E27G/D43G/N45D/V58A/N78I, I20L/D43G/N45D/V58A/N78I, I20L/A33D/D43G/N45D/V58A/N78I, I20L/D43G/N45D/N78I, E27G/N45T/V50A/N78I, N45T/V50A/N78I, V11A/I20L/E27G/D43G/N45D/H51Y/S99G, I20L/E27G/D43G/N45T/V50A, I20L/K28E/D43G/N45D/V58A/Q89R, I20L/I36T/N45D, I20L/K28E/D43G/N45D/E53G/V58A/N78I, A33D/D43G/N45D/V58A/S75P, K23R/D43G/N45D, I20L/D43G/N45D/V58A/N78I/D90G/G101D, D43G/N45D/L56Q/V58A/G101GG, I20L/K23E/D43G/N45D/V58A/N78I, I20L/K23E/D43G/N45D/V50A/N78I, T19I/E27G/N45I/V50A/N78I/M97K, I20L/M41K/D43G/N45D, K23R/N45T/N78I, I20L/K28E/D43G/N45D/V58A/Q89R/G101G-ins (G101GG), K57R/S99G, K57R/S99G/F189L, M18V/M97L/F193S/R195G/E200K/H202Q, I36S/M41K/M97L/K144Q/R195G/E200K/H202Q/L206F, C22R/Q65L/L124S/K144Q/R195G/E200N/H202Q/T221L, M18V/I98L/L124S/P198T/L206F, S99G/N117S/I148V/K171R/R180S, I36T/M97L/A103V/Q155H, K28I/S99G, R195S, A79T/S99G/T185A/R195G/E200K/H202Q/L206F, K57R/S99G/L124S/K144Q, K57R/S99G/R195G, D55V/M97L/S99G, E27G/I36T/D55N/M97L/K111E, E54G/M97L/S99G, G15A/I36T/M97L/K111E/H202Q, G15A/I36T/V129D, G15A/I36T/V129D/R195G, G15A/V129D, I36S/M97L, I36T/D55N/M97L/K111E/A204T, I36T/D55N/M97L/K111E/V129A/F173L, I36T/D55S/M97L/K111E/I148V/R180S, I36T/G52R/M97L/V112A/K144E/V175A/P198T, I36T/I46V/D55G/M97L/K106E/K144E/T185A/R195G, I36T/I83T/M97L/K144E/P198T, I36T/M97L/K111E, I36T/M97L/K144E/P198T, I36T/M97L/Q155H/F193S/N201Y, I36T/M97L/V129D, L35P/I36S/M97L/K111E, M18I/I36T/E53G/M97L/K144E/E199G/V207A, M18T/I36T/D55N/M97L/K111E, M18V/M97L/T176N/R195G, M97L/S99G, N17D/M97L/S99G, S99G/T185A/R195G/P198T, V129D/H202Q, V129D/P198T, V129D/T150A, V93E/V129D, Y10F/M18V/S99G/Q138R/T203A, N45D, K160M/R195G, N45D/K144E, N45D/P198S, N45D/P198T, N45D/R195G, N45D/R195S, N45D/S131F, N45D/V58D, V129D/R195S, I98T/F173Y/L196S, N45D/E134G/L213P, N45D/F173I/S177C, N45D/I148V/R195G, N45D/K111T/R195G, N45D/N113Y/R195S, N45D/N165Y/E170G, N45D/Q89R/I98V, N45D/S131F/P198S, N45D/S75P/P198S, N45D/V50A/R195T, E27D/N45D/T183A/I188V, F173Y/T183I/L196S/T203A, K23N/N45D/S75P/N120S, N45D/G102D/R194W/R195G, N45D/G52V/Q121L/P198S, N45D/I148V/R195G/N201D, N45D/K111T/T183A/I188V, N45D/Q89R/F189S/P198S, N45D/S99G/C137R/V207A, N45D/T163I/K167R/R195G, N45D/T183A/T192S/R194G, N45D/V50A/I119T/K144E, T19A/N45D/K144E/R195G, V11E/N45D/T130A/P198T, V26A/N45D/T163I/T185A, K23N/N45D/L124S/K167T/R195G, K23N/N45D/Q73R/T163I, K28E/N45D/W149R/S158G/P198T, K28R/N45D/K57E/I98V/R195S, K28R/N45D/V129D/T163N/R195T, M41K/D43G/N45D/R64S/R195G, M41K/D43G/N45D/R64S/S99G, N45D/R68L/F173L/D197G/P198S, N45D/V50A/I148V/R195G/N201D, M41K/D43G/K44E/N45D/R195G/N201D, or N45D/V50A/L124S/K144E/L179P/R195G.

[0177] In some embodiments, the variant PD-L1 polypeptide comprises amino acid modifications in an unmodified PD-L1 or specific binding fragment thereof at a position corresponding to position 20, with reference to numbering of positions set forth in SEQ ID NO:30. In some embodiments, the amino acid modification is the amino acid substitution I20L or a conservative amino acid substitution thereof. In some embodiments, the variant PD-L1 polypeptide further contains one or more amino acid modifications, e.g. amino acid substitutions, at one or more positions 27, 33, 36, 43, 45, 50, 58, 75, 78, 97, 99, 195 or 198. In some embodiments, the one or more amino acid modification is one or more amino acid substitutions E27G, A33D, I36T, D43G, N45D, N45T, V50A, V58A, S75P, N78I, M97L, S99G, R195G, P198S or P198T, or a conservative amino acid substitution thereof. In some embodiments, the variant PD-L1 polypeptide comprises the amino acid modifications I20L/E27G, I20L/A33D, I20L/I36T, I20L/D43G, I20L/N45D, I20L/N45T, I20L/V50A, I20L/V58A, I20L/S75P, I20L/N78I, I20L/M97L, I20L/S99G, I20L/R195G, I20L/P198S or I20L/R198T.

[0178] In some embodiments, the variant PD-L1 polypeptide comprises amino acid modifications in an unmodified PD-L1 or specific binding fragment thereof at a position corresponding to position 27, with reference to numbering of positions set forth in SEQ ID NO:30. In some embodiments, the amino acid modification is the amino acid substitution E27G or a conservative amino acid substitution thereof. In some embodiments, the variant PD-L1 polypeptide further contains one or more amino acid modifications, e.g. amino acid substitutions, at one or more positions 20, 33, 36, 43, 45, 50, 58, 75, 78, 97, 99, 195 or 198. In some embodiments, the one or more amino acid modification is one or more amino acid substitutions I20L, A33D, I36T, D43G, N45D, N45T, V50A, V58A, S75P, N78I, M97L, S99G, R195G, P198S or P198T, or a conservative amino acid substitution thereof. In some embodiments, the variant PD-L1 polypeptide comprises the amino acid modifications I20L/E27G, E27G/A33D, E27G/I36T, E27G/D43G, E27G/N45D, E27G/N45T, E27G/V50A, E27G/V58A, E27G/S75P, E27G/N78I, E27G/M97L, E27G/S99G, E27G/R195G, E27G/P198S or E27G/R198T.

[0179] In some embodiments, the variant PD-L1 polypeptide comprises amino acid modifications in an unmodified PD-L1 or specific binding fragment thereof at a position corresponding to position 33, with reference to numbering of positions set forth in SEQ ID NO:30. In some embodiments, the amino acid modification is the amino acid substitution A33D or a conservative amino acid substitution thereof. In some embodiments, the variant PD-L1 polypeptide further contains one or more amino acid modifications, e.g. amino acid substitutions, at one or more positions 20, 27, 36, 43, 45, 50, 58, 75, 78, 97, 99, 195 or 198. In some embodiments, the one or more amino acid modification is one or more amino acid substitutions I20L, E27G, I36T, D43G, N45D, N45T, V50A, V58A, S75P, N78I, M97L, S99G, R195G, P198S or P198T, or a conservative amino acid substitution thereof. In some embodiments, the variant PD-L1 polypeptide comprises the amino acid modifications I20L/A33D, E27G/A33D, A33D/I36T, A33D/D43G, A33D/N45D, A33D/N45T, A33D/V50A, A33D/V58A, A33D/S75P, A33D/N78I, A33D/M97L, A33D/S99G, A33D/R195G, A33D/P198S or A33D/R198T.

[0180] In some embodiments, the variant PD-L1 polypeptide comprises amino acid modifications in an unmodified PD-L1 or specific binding fragment thereof at a position corresponding to position 36, with reference to numbering of positions set forth in SEQ ID NO:30. In some embodiments, the amino acid modification is the amino acid substitution I36T or a conservative amino acid substitution thereof. In some embodiments, the variant PD-L1 polypeptide further contains one or more amino acid modifications, e.g. amino acid substitutions, at one or more positions 20, 27, 33, 43, 45, 50, 58, 75, 78, 97, 99, 195 or 198. In some embodiments, the one or more amino acid modification is one or more amino acid substitutions I20L, E27G, A33D, D43G, N45D, N45T, V50A, V58A, S75P, N78I, M97L, S99G, R195G, P198S or P198T, or a conservative amino acid substitution thereof. In some embodiments, the variant PD-L1 polypeptide comprises the amino acid modifications I20L/I36T, E27G/I36T, A33D/I36T, I36T/D43G, I36T/N45D, I36T/N45T, A33D/V50A, I36T/V58A, I36T/S75P, I36T/N78I, I36T/M97L, I36T/S99G, I36T/R195G, I36T/P198S or I36T/R198T.

[0181] In some embodiments, the variant PD-L1 polypeptide comprises amino acid modifications in an unmodified PD-L1 or specific binding fragment thereof at a position corresponding to position 43, with reference to numbering of positions set forth in SEQ ID NO:30. In some embodiments, the amino acid modification is the amino acid substitution D43G or a conservative amino acid substitution thereof. In some embodiments, the variant PD-L1 polypeptide further contains one or more amino acid modifications, e.g. amino acid substitutions, at one or more positions 20, 27, 33, 36, 45, 50, 58, 75, 78, 97, 99, 195 or 198. In some embodiments, the one or more amino acid modification is one or more amino acid substitutions I20L, E27G, A33D, I36T, N45D, N45T, V50A, V58A, S75P, N78I, M97L, S99G, R195G, P198S or P198T, or a conservative amino acid substitution thereof. In some embodiments, the variant PD-L1 polypeptide comprises the amino acid modifications I20L/D43G, E27G/D43G, A33D/D43G, I36T/D43G, D43G/N45D, D43G/N45T, D43G/V50A, D43G/V58A, D43G/S75P, D43G/N78I, D43G/M97L, D43G/S99G, D43G/R195G, D43G/P198S or D43G/R198T. In some embodiments, the variant PD-L1 polypeptide comprises the amino acid modifications D43G/N45D/V58A.

[0182] In some embodiments, the variant PD-L1 polypeptide comprises amino acid modifications in an unmodified PD-L1 or specific binding fragment thereof at a position corresponding to position 45, with reference to numbering of positions set forth in SEQ ID NO:30. In some embodiments, the amino acid modification is the amino acid substitution N45D or N45T, or a conservative amino acid substitution thereof. In some embodiments, the variant PD-L1 polypeptide further contains one or more amino acid modifications, e.g. amino acid substitutions, at one or more positions 20, 27, 33, 36, 43, 50, 58, 75, 78, 97, 99, 195 or 198. In some embodiments, the one or more amino acid modification is one or more amino acid substitutions I20L, E27G, A33D, I36T, D43G, V50A, V58A, S75P, N78I, M97L, S99G, R195G, P198S or P198T, or a conservative amino acid substitution thereof. In some embodiments, the variant PD-L1 polypeptide comprises the amino acid modifications I20L/N45D, E27G/N45D, A33D/N45D, I36T/N45D, D43G/N45D, N45D/V50A, N45D/V58A, N45D/S75P, N45D/S75P, N45D/N78I, N45D/M97L, N45D/S99G, N45D/R195G, N45D/P198S or N45D/R198T. In some embodiments, the variant PD-L1 polypeptide comprises the amino acid modifications I20L/N45T, E27G/N45T, A33D/N45T, I36T/N45T, D43G/N45T, N45T/V50A, N45T/V58A, N45T/S75P, N45T/N78I, N45T/M97L, N45T/S99G, N45T/R195G, N45T/P198S or N45T/R198T. In some embodiments, the variant PD-L1 polypeptide comprises the amino acid modifications D43G/N45D/V58A.

[0183] In some embodiments, the variant PD-L1 polypeptide comprises amino acid modifications in an unmodified PD-L1 or specific binding fragment thereof at a position corresponding to position 50, with reference to numbering of positions set forth in SEQ ID NO:30. In some embodiments, the amino acid modification is the amino acid substitution V50A, or a conservative amino acid substitution thereof. In some embodiments, the variant PD-L1 polypeptide further contains one or more amino acid modifications, e.g. amino acid substitutions, at one or more positions 20, 27, 33, 36, 43, 45, 58, 75, 78, 97, 99, 195 or 198. In some embodiments, the one or more amino acid modification is one or more amino acid substitutions I20L, E27G, A33D, I36T, D43G, N45D, N45T, V58A, S75P, N78I, M97L, S99G, R195G, P198S or P198T, or a conservative amino acid substitution thereof. In some embodiments, the variant PD-L1 polypeptide comprises the amino acid modifications I20L/V50A, E27G/V50A, A33D/V50A, I36T/V50A, D43G/V50A, N45D/V50A, V50A/V58A, V50A/S75P, V50A/N78I, V50A/M97L, V50A/S99G, V50A/R195G, V50A/P198S or V50A/R198T.

[0184] In some embodiments, the variant PD-L1 polypeptide comprises amino acid modifications in an unmodified PD-L1 or specific binding fragment thereof at a position corresponding to position 58, with reference to numbering of positions set forth in SEQ ID NO:30. In some embodiments, the amino acid modification is the amino acid substitution V58A, or a conservative amino acid substitution thereof. In some embodiments, the variant PD-L1 polypeptide further contains one or more amino acid modifications, e.g. amino acid substitutions, at one or more positions 20, 27, 33, 36, 43, 45, 50, 75, 78, 97, 99, 195 or 198. In some embodiments, the one or more amino acid modification is one or more amino acid substitutions I20L, E27G, A33D, I36T, D43G, N45D, N45T, V50A, S75P, N78I, M97L, S99G, R195G, P198S or P198T, or a conservative amino acid substitution thereof. In some embodiments, the variant PD-L1 polypeptide comprises the amino acid modifications I20L/V58A, E27G/V58A, A33D/V58A, I36T/V58A, D43G/V58A, N45D/V58A, V50A/V58A, V58A/S75P, V58A/N78I, V58A/M97L, V58A/S99G, V58A/R195G, V58A/P198S or V58A/R198T. In some embodiments, the variant PD-L1 polypeptide comprises the amino acid modifications D43G/N45D/V58A.

[0185] In some embodiments, the variant PD-L1 polypeptide comprises amino acid modifications in an unmodified PD-L1 or specific binding fragment thereof at a position corresponding to position 75, with reference to numbering of positions set forth in SEQ ID NO:30. In some embodiments, the amino acid modification is the amino acid substitution S75P, or a conservative amino acid substitution thereof. In some embodiments, the variant PD-L1 polypeptide further contains one or more amino acid modifications, e.g. amino acid substitutions, at one or more positions 20, 27, 33, 36, 43, 45, 50, 58, 78, 97, 99, 195 or 198. In some embodiments, the one or more amino acid modification is one or more amino acid substitutions I20L, E27G, A33D, I36T, D43G, N45D, N45T, V50A, V58A, N78I, M97L, S99G, R195G, P198S or P198T, or a conservative amino acid substitution thereof. In some embodiments, the variant PD-L1 polypeptide comprises the amino acid modifications I20L/S75P, E27G/S75P, A33D/S75P, I36T/S75P, D43G/S75P, N45D/S75P, V50A/S75P, V58A/S75P, S75P/N78I, S75P/M97L, S75P/S99G, S75P/R195G, S75P/P198S or S75P/R198T.

[0186] In some embodiments, the variant PD-L1 polypeptide comprises amino acid modifications in an unmodified PD-L1 or specific binding fragment thereof at a position corresponding to position 78, with reference to numbering of positions set forth in SEQ ID NO:30. In some embodiments, the amino acid modification is the amino acid substitution N78I, or a conservative amino acid substitution thereof. In some embodiments, the variant PD-L1 polypeptide further contains one or more amino acid modifications, e.g. amino acid substitutions, at one or more positions 20, 27, 33, 36, 43, 45, 50, 58, 75, 97, 99, 195 or 198. In some embodiments, the one or more amino acid modification is one or more amino acid substitutions I20L, E27G, A33D, I36T, D43G, N45D, N45T, V50A, V58A, S75P, M97L, S99G, R195G, P198S or P198T, or a conservative amino acid substitution thereof. In some embodiments, the variant PD-L1 polypeptide comprises the amino acid modifications I20L/N78I, E27G/N78I, A33D/N78I, I36T/N78I, D43G/N78I, N45D/N78I, V50A/N78I, V58A/N78I, S75P/N78I, N78I/M97L, N78I/S99G, N78I/R195G, N78I/P198S or N78I/R198T.

[0187] In some embodiments, the variant PD-L1 polypeptide comprises amino acid modifications in an unmodified PD-L1 or specific binding fragment thereof at a position corresponding to position 97, with reference to numbering of positions set forth in SEQ ID NO:30. In some embodiments, the amino acid modification is the amino acid substitution M97L, or a conservative amino acid substitution thereof. In some embodiments, the variant PD-L1 polypeptide further contains one or more amino acid modifications, e.g. amino acid substitutions, at one or more positions 20, 27, 33, 36, 43, 45, 50, 58, 75, 78, 99, 195 or 198. In some embodiments, the one or more amino acid modification is one or more amino acid substitutions I20L, E27G, A33D, I36T, D43G, N45D, N45T, V50A, V58A, S75P, N78I, S99G, R195G, P198S or P198T, or a conservative amino acid substitution thereof. In some embodiments, the variant PD-L1 polypeptide comprises the amino acid modifications I20L/M97L, E27G/M97L, A33D/M97L, I36T/M97L, D43G/M97L, N45D/M97L, V50A/M97L, V58A/M97L, S75P/M97L, N78I/M97L, M97L/S99G, M97L/R195G, M97L/P198S or M97L/R198T.

[0188] In some embodiments, the variant PD-L1 polypeptide comprises amino acid modifications in an unmodified PD-L1 or specific binding fragment thereof at a position corresponding to position 99, with reference to numbering of positions set forth in SEQ ID NO:30. In some embodiments, the amino acid modification is the amino acid substitution S99G, or a conservative amino acid substitution thereof. In some embodiments, the variant PD-L1 polypeptide further contains one or more amino acid modifications, e.g. amino acid substitutions, at one or more positions 20, 27, 33, 36, 43, 45, 50, 58, 75, 78, 97, 195 or 198. In some embodiments, the one or more amino acid modification is one or more amino acid substitutions I20L, E27G, A33D, I36T, D43G, N45D, N45T, V50A, V58A, S75P, N78I, M97L, R195G, P198S or P198T, or a conservative amino acid substitution thereof. In some embodiments, the variant PD-L1 polypeptide comprises the amino acid modifications I20L/S99G, E27G/S99G, A33D/S99G, I36T/S99G, D43G/S99G, N45D/S99G, V50A/S99G, V58A/S99G, S75P/S99G, N78I/S99G, M97L/S99G, S99G/R195G, S99G/P198S or S99G/R198T.

[0189] In some embodiments, the variant PD-L1 polypeptide comprises amino acid modifications in an unmodified PD-L1 or specific binding fragment thereof at a position corresponding to position 195, with reference to numbering of positions set forth in SEQ ID NO:30. In some embodiments, the amino acid modification is the amino acid substitution R195G, or a conservative amino acid substitution thereof. In some embodiments, the variant PD-L1 polypeptide further contains one or more amino acid modifications, e.g. amino acid substitutions, at one or more positions 20, 27, 33, 36, 43, 45, 50, 58, 75, 78, 97, 99 or 198. In some embodiments, the one or more amino acid modification is one or more amino acid substitutions I20L, E27G, A33D, I36T, D43G, N45D, N45T, V50A, V58A, S75P, N78I, M97L, S99G, P198S or P198T, or a conservative amino acid substitution thereof. In some embodiments, the variant PD-L1 polypeptide comprises the amino acid modifications I20L/R195G, E27G/R195G, A33D/R195G, I36T/R195G, D43G/R195G, N45D/R195G, V50A/R195G, V58A/R195G, S75P/R195G, N78I/R195G, M97L/R195G, S99G/R195G, R195G/P198S or R195G/R198T.

[0190] In some embodiments, the variant PD-L1 polypeptide comprises amino acid modifications in an unmodified PD-L1 or specific binding fragment thereof at a position corresponding to position 198, with reference to numbering of positions set forth in SEQ ID NO:30. In some embodiments, the amino acid modification is the amino acid substitution P198S or P198T, or a conservative amino acid substitution thereof. In some embodiments, the variant PD-L1 polypeptide further contains one or more amino acid modifications, e.g. amino acid substitutions, at one or more positions 20, 27, 33, 36, 43, 45, 50, 58, 75, 78, 97, 99 or 195. In some embodiments, the one or more amino acid modification is one or more amino acid substitutions I20L, E27G, A33D, I36T, D43G, N45D, N45T, V50A, V58A, S75P, N78I, M97L, S99G, or R195G, or a conservative amino acid substitution thereof. In some embodiments, the variant PD-L1 polypeptide comprises the amino acid modifications I20L/P198S, E27G/P198S, A33D/P198S, I36T/P198S, D43G/P198S, N45D/P198S, V50A/P198S, V58A/P198S, S75P/P198S, N78I/P198S, M97L/P198S, S99G/P198S, or R195G/P198S. In some embodiments, the variant PD-L1 polypeptide comprises the amino acid modifications I20L/P198T, E27G/P198T, A33D/P198T, I36T/P198T, D43G/P198T, N45D/P198T, V50A/P198T, V58A/P198T, S75P/P198T, N78I/P198T, M97L/P198T, S99G/P198T, or R195G/P198T.

[0191] In some embodiments, the variant PD-L1 polypeptide comprises any of the substitutions (mutations) listed in Table 1. Table 1 also provides exemplary sequences by reference to SEQ ID NO for the extracellular domain (ECD) or IgV domain of wild-type PD-L1 or exemplary variant PD-L1 polypeptides. As indicated, the exact locus or residues corresponding to a given domain can vary, such as depending on the methods used to identify or classify the domain. Also, in some cases, adjacent N- and/or C-terminal amino acids of a given domain (e.g. ECD or IgV) also can be included in a sequence of a variant IgSF polypeptide, such as to ensure proper folding of the domain when expressed. Thus, it is understood that the exemplification of the SEQ ID NOSs in Table 1 is not to be construed as limiting. For example, the particular domain, such as the ECD or IgV domain, of a variant PD-L1 polypeptide can be several amino acids longer or shorter, such as 1-10, e.g. 1, 2, 3, 4, 5, 6 or 7 amino acids longer or shorter, than the sequence of amino acids set forth in the respective SEQ ID NO.

[0192] In some embodiments, the variant PD-L1 polypeptide comprises or consists of any of the extracellular domain (ECD) sequences listed in Table 1 (i.e., any one of SEQ ID NOS: 56-120, 1725, 1729-1818, 1819-1907, 1943-2008). In some embodiments, the variant PD-L1 polypeptide comprises or consists of a polypeptide sequence that exhibits at least 90% identity, at least 91% identity, at least 92% identity, at least 93% identity, at least 94% identity, at least 95% identity, such as at least 96% identity, 97% identity, 98% identity, or 99% identity to any of the extracellular domain (ECD) sequences listed in Table 1 (i.e., any one of SEQ ID NOS: 56-120, 1725, 1729-1818, 1819-1907, 1943-2008) and contains the amino acid modification(s), e.g. substitution(s), not present in the wild-type or unmodified PD-L1. In some embodiments, the variant PD-L1 polypeptide comprises or consists of a specific binding fragment of any of the extracellular domain (ECD) sequences listed in Table 1 (i.e., any one of SEQ ID NOS: 56-120, 1725, 1729-1818, 1819-1907, 1943-2008) and contains the amino acid modification(s), e.g. substitution(s), not present in the wild-type or unmodified PD-L1.

[0193] In some embodiments, the variant PD-L1 polypeptide comprises or consists of any of the IgV sequences listed in Table 1 (i.e., any one of SEQ ID NOS: 121-185, 244-308, 1726-1727, 1908-1937). In some embodiments, the variant PD-L1 polypeptide comprises or consists of a polypeptide sequence that exhibits at least 90% identity, at least 91% identity, at least 92% identity, at least 93% identity, at least 94% identity, at least 95% identity, such as at least 96% identity, 97% identity, 98% identity, or 99% identity to any of the IgV sequences listed in Table 1 (i.e., any one of SEQ ID NOS: 121-185, 244-308, 1726-1727, 1908-1937) and contains the amino acid modification(s), e.g. substitution(s), not present in the wild-type or unmodified PD-L1. In some embodiments, the variant PD-L1 polypeptide comprises or consists of a specific binding fragment of any of the IgV sequences listed in Table 1 (i.e., any one of SEQ ID NOS: 121-185, 244-308, 1726-1727, 1908-1937) and contains the amino acid modification(s), e.g. substitution(s), not present in the wild-type or unmodified PD-L1.

TABLE 1
Exemplary variant PD-L1 polypeptides

| | ECD SEQ | IgV SEQ |
|---|---|---|
| Mutation(s) | ID NO | ID NO |
| Wild-type | 30, 1728 | 55, 309 |
| K28N/M41V/N45T/H51N/K57E | 56, 1943 | 121, 244 |
| I20L/I36T/N45D/I47T | 57, 1944 | 122, 245 |
| I20L/M41K/K44E | 58, 1945 | 123, 246 |
| P6S/N45T/N78I/I83T | 59, 1946 | 124, 247 |
| N78I | 60, 1947 | 125, 248 |
| M41K/N78I | 61, 1948 | 126, 249 |
| N45T/N78I | 62, 1949 | 127, 250 |
| I20L/N45T | 63, 1950 | 128, 251 |
| N45T | 64, 1951 | 129, 252 |
| M41K | 65, 1952 | 130, 253 |
| I20L/I36T/N45D | 66, 1953 | 131, 254 |
| N17D/N45T/V50A/D72G | 67, 1954 | 132, 255 |
| I20L/F49S | 68, 1955 | 133, 256 |
| N45T/V50A | 69, 1956 | 134, 257 |
| I20L/N45T/N78I | 70, 1957 | 135, 258 |
| I20L/N45T/V50A | 71, 1958 | 136, 259 |
| M41V/N45T | 72, 1959 | 137, 260 |
| M41K/N45T | 73, 1960 | 138, 261 |
| A33D/S75P/D85E | 74, 1961 | 139, 262 |
| M18I/M41K/D43G/H51R/N78I | 75, 1962 | 140, 263 |
| V11E/I20L/I36T/N45D/H60R/S75P | 76, 1963 | 141, 264 |
| A33D/V50A | 77, 1964 | 142, 265 |
| S16G/A33D/K71E/S75P | 78, 1965 | 143, 266 |
| E27G/N45T/M97I | 79, 1966 | 144, 267 |
| E27G/N45T/K57R | 80, 1967 | 145, 268 |
| A33D/E53V | 81, 1968 | 146, 269 |
| D43G/N45D/V58A | 82, 1969 | 147, 270 |
| E40G/D43V/N45T/V50A | 83, 1970 | 148, 271 |
| Y14S/K28E/N45T | 84, 1971 | 149, 272 |
| A33D/N78S | 85, 1972 | 150, 272 |
| A33D/N78I | 86, 1973 | 151, 274 |
| A33D/N45T | 87, 1974 | 152, 275 |
| A33D/N45T/N78I | 88, 1975 | 153, 276 |
| E27G/N45T/V50A | 89, 1976 | 154, 277 |
| N45T/V50A/N78S | 90, 1977 | 155, 278 |
| I20L/N45T/V110M | 91, 1978 | 156, 279 |
| I20L/I36T/N45T/V50A | 92, 1979 | 157, 280 |
| N45T/L74P/S75P | 93, 1980 | 158, 281 |
| N45T/S75P | 94, 1981 | 159, 282 |
| S75P/K106R | 95, 1982 | 160, 283 |
| S75P | 96, 1983 | 161, 284 |
| A33D/S75P | 97, 1984 | 162, 285 |
| A33D/S75P/D104G | 98, 1985 | 163, 286 |
| A33D/S75P | 99, 1986 | 164, 287 |
| I20L/E27G/N45T/V50A | 100, 1987 | 165, 288 |
| I20L/E27G/D43G/N45D/V58A/N78I | 101, 1988 | 166, 289 |
| I20L/D43G/N45D/V58A/N78I | 102, 1989 | 167, 290 |
| I20L/A33D/D43G/N45D/V58A/N78I | 103, 1990 | 168, 291 |
| I20L/D43G/N45D/N78I | 104, 1991 | 169, 292 |
| E27G/N45T/V50A/N78I | 105, 1992 | 170, 293 |
| N45T/V50A/N78I | 106, 1993 | 171, 294 |
| V11A/I20L/E27G/D43G/N45D/H51Y/S99G | 107, 1994 | 172, 295 |
| I20L/E27G/D43G/N45T/V50A | 108, 1995 | 173, 296 |
| I20L/K28E/D43G/N45D/V58A/Q89R | 109, 1996 | 174, 297 |
| I20L/I36T/N45D | 110, 1997 | 175, 298 |
| I20L/K28E/D43G/N45D/E53G/V58A/N78I | 111, 1998 | 176, 299 |
| A33D/D43G/N45D/V58A/S75P | 112, 1999 | 177, 300 |
| K23R/D43G/N45D | 113, 2000 | 178, 301 |
| I20L/D43G/N45D/V58A/N78I/D90G/G101D | 114, 2001 | 179, 302 |
| D43G/N45D/L56Q/V58A/G101G-ins (G101GG) | 115, 2002 | 180, 303 |
| I20L/K23E/D43G/N45D/V58A/N78I | 116, 2003 | 181, 304 |
| I20L/K23E/D43G/N45D/V50A/N78I | 117, 2004 | 182, 305 |
| T19I/E27G/N45I/V50A/N78I/M97K | 118, 2005 | 183, 306 |
| I20L/M41K/D43G/N45D | 119, 2006 | 184, 307 |
| K23R/N45T/N78I | 120, 2007 | 185, 308 |
| I20L/K28E/D43G/N45D/V58A/Q89R/G101G-ins (G101GG) | 1725, 2008 | 1726, 1727 |
| K57R/S99G | 1729, 1819 | 1908, 1923 |
| K57R/S99G/F189L | 1730, 1820 | |
| M18V/M97L/F193S/R195G/E200K/H202Q | 1731, 1821 | |
| I36S/M41K/M97L/K144Q/R195G/E200K/H202Q/L206F | 1732, 1822 | |
| C22R/Q65L/L124S/K144Q/R195G/E200N/H202Q/T221L | 1733 | |
| M18V/I98L/L124S/P198T/L206F | 1734, 1823 | |
| S99G/N117S/I148V/K171R/R180S | 1735, 1824 | |
| I36T/M97L/A103V/Q155H | 1736, 1825 | |
| K28I/S99G | 1737, 1826 | 1909, 1924 |
| R195S | 1738, 1827 | |
| A79T/S99G/T185A/R195G/E200K/H202Q/L206F | 1739, 1828 | |
| K57R/S99G/L124S/K144Q | 1740, 1829 | |
| K57R/S99G/R195G | 1741, 1830 | |
| D55V/M97L/S99G | 1742, 1831 | 1910, 1925 |
| E27G/I36T/D55N/M97L/K111E | 1743, 1832 | 1911, 1926 |
| E54G/M97L/S99G | 1744, 1833 | 1912, 1927 |
| G15A/I36T/M97L/K111E/H202Q | 1745, 1834 | |
| G15A/I36T/V129D | 1746, 1835 | |
| G15A/I36T/V129D/R195G | 1747, 1836 | |
| G15A/V129D | 1748, 1837 | |
| I36S/M97L | 1749, 1838 | 1913, 1928 |
| I36T/D55N/M97L/K111E/A204T | 1750, 1839 | |
| I36T/D55N/M97L/K111E/V129A/F173L | 1751, 1840 | |
| I36T/D55S/M97L/K111E/I148V/R180S | 1752, 1841 | |
| I36T/G52R/M97L/V112A/K144E/V175A/P198T | 1753, 1842 | |
| I36T/I46V/D55G/M97L/K106E/K144E/T185A/R195G | 1754, 1843 | |
| I36T/I83T/M97L/K144E/P198T | 1755, 1844 | |
| I36T/M97L/K111E | 1756, 1845 | 1914, 1929 |
| I36T/M97L/K144E/P198T | 1757, 1846 | |
| I36T/M97L/Q155H/F193S/N201Y | 1758, 1847 | |
| I36T/M97L/V129D | 1759, 1848 | |
| L35P/I36S/M97L/K111E | 1760, 1849 | 1915, 1930 |
| M18I/I36T/E53G/M97L/K144E/E199G/V207A | 1761, 1850 | |
| M18T/I36T/D55N/M97L/K111E | 1762, 1851 | 1916, 1931 |
| M18V/M97L/T176N/R195G | 1763, 1852 | |
| M97L/S99G | 1764, 1853 | 1917, 1932 |
| N17D/M97L/S99G | 1765, 1854 | 1918, 1933 |
| S99G/T185A/R195G/P198T | 1766, 1855 | |
| V129D/H202Q | 1767, 1856 | |
| V129D/P198T | 1768, 1857 | |
| V129D/T150A | 1769, 1858 | |
| V93E/V129D | 1770, 1859 | |
| Y10F/M18V/S99G/Q138R/T203A | 1771, 1860 | |
| N45D | 1772, 1861 | 1919, 1934 |
| K160M/R195G | 1773, 1862 | |
| N45D/K144E | 1774, 1863 | |
| N45D/P198S | 1775, 1864 | |
| N45D/P198T | 1776, 1865 | |
| N45D/R195G | 1777, 1866 | |
| N45D/R195S | 1778, 1867 | |
| N45D/S131F | 1779, 1868 | |
| N45D/V58D | 1780, 1869 | 1920, 1935 |
| V129D/R195S | 1781, 1870 | |
| I98T/F173Y/L196S | 1782, 1871 | |
| N45D/E134G/L213P | 1783, 1872 | |
| N45D/F173I/S177C | 1784, 1873 | |
| N45D/I148V/R195G | 1785, 1874 | |
| N45D/K111T/R195G | 1786, 1875 | |
| N45D/N113Y/R195S | 1787, 1876 | |
| N45D/N165Y/E170G | 1788, 1877 | |
| N45D/Q89R/I98V | 1789, 1878 | 1921, 1936 |
| N45D/S131F/P198S | 1790, 1879 | |
| N45D/S75P/P198S | 1791, 1880 | |
| N45D/V50A/R195T | 1792, 1881 | |
| E27D/N45D/T183A/I188V | 1793, 1882 | |
| F173Y/T183I/L196S/T203A | 1794, 1883 | |
| K23N/N45D/S75P/N120S | 1795, 1884 | |
| N45D/G102D/R194W/R195G | 1796, 1885 | |
| N45D/G52V/Q121L/P198S | 1797, 1886 | |
| N45D/I148V/R195G/N201D | 1798, 1887 | |
| N45D/K111T/T183A/I188V | 1799, 1888 | |
| N45D/Q89R/F189S/P198S | 1800, 1889 | |
| N45D/S99G/C137R/V207A | 1801, 1890 | |
| N45D/T163I/K167R/R195G | 1802, 1891 | |
| N45D/T183A/T192S/R194G | 1803, 1892 | |
| N45D/V50A/I119T/K144E | 1804, 1893 | |
| T19A/N45D/K144E/R195G | 1805, 1894 | |
| V11E/N45D/T130A/P198T | 1806, 1895 | |
| V26A/N45D/T163I/T185A | 1807, 1896 | |
| K23N/N45D/L124S/K167T/R195G | 1808, 1897 | |
| K23N/N45D/Q73R/T163I | 1809, 1898 | |
| K28E/N45D/W149R/S158G/P198T | 1810, 1899 | |
| K28R/N45D/K57E/I98V/R195S | 1811, 1900 | |
| K28R/N45D/V129D/T163N/R195T | 1812, 1901 | |
| M41K/D43G/N45D/R64S/R195G | 1813, 1902 | |
| M41K/D43G/N45D/R64S/S99G | 1814, 1903 | 1922, 1937 |
| N45D/R68L/F173L/D197G/P198S | 1815, 1904 | |
| N45D/V50A/I148V/R195G/N201D | 1816, 1905 | |
| M41K/D43G/K44E/N45D/R195G/N201D | 1817, 1906 | |
| N45D/V50A/L124S/K144E/L179P/R195G | 1818, 1907 | |

[0194] In some embodiments, the variant PD-L1 polypeptide exhibits increased affinity for the ectodomain of PD-1 compared to the wild-type or unmodified PD-L1 polypeptide, such as comprising the sequence set forth in SEQ ID NO: 30, 1728, 55 or 309. In some embodiments, the PD-L1 polypeptide exhibits increased affinity for the ectodomain of CD80 compared to the wild-type or unmodified PD-L1, such as comprising the sequence set forth in SEQ ID NO: 30, 1728, 55 or 309. In some embodiments, the PD-L1 polypeptide exhibits increased affinity for the ectodomain of PD-1 and the ectodomain of CD80 compared to the wild-type or unmodified PD-L1, such as comprising the sequence set forth in SEQ ID NO: 30, 1728, 55 or 309.

[0195] In some embodiments, the variant PD-L1 polypeptide exhibits increased binding affinity for binding one of the ectodomains of PD-1 or CD80 and exhibits decreased binding affinity for binding to the other of the ectodomains of PD-1 or CD80 compared to the wild-type or unmodified PD-L1 polypeptide, such as comprising the sequence set forth in SEQ ID NO: 30, 1728, 55 or 309. In some embodiments, the variant PD-L1 polypeptide exhibits increased affinity for the ectodomain of PD-1, and decreased affinity for the ectodomain of CD80, compared to wild-type or unmodified PD-L1 polypeptide, such as comprising the sequence set forth in SEQ ID NO: 30, 1728, 55 or 309. In some embodiments, the variant PD-L1 polypeptide exhibits increased affinity for the ectodomain of CD80 and decreased affinity for the ectodomain of PD-1, compared to wild-type or unmodified PD-L1 polypeptide, such as comprising the sequence set forth in SEQ ID NO: 30, 1728, 55 or 309.

[0196] In some embodiments, a variant PD-L1 polypeptide exhibits increased selectivity for PD-1 versus CD80 compared to the ratio of binding of the unmodified PD-L1 polypeptide (e.g. set forth in SEQ ID NO: 30, 55 or 309) for binding PD-1 versus CD80, such as indicated by a ratio of PD-1 binding to CD80 binding (PD-1:CD80 binding ratio) that is greater than 1. In some embodiments, the variant PD-L1 polypeptide exhibits a ratio of binding PD-1 versus CD80 that is greater than or greater than about or 1.1, 1.2, 1.3, 1.4, 1.5, 2, 3, 4, 5, 6, 7, 8, 9, 10, 11, 12, 13, 14, 15, 16, 17, 18, 19, 20, 21, 22, 23, 24, 25, 26, 27, 28, 29, 30, 35, 40, 45, 50, 55, 60, 65, 70, or more.

### III. FORMAT OF VARIANT POLYPEPTIDES

[0197] The immunomodulatory polypeptide comprising a variant PD-L1 provided herein in which is contained a vIgD can be formatted in a variety of ways, including as a soluble protein, membrane bound protein or secreted protein. In some embodiments, the particular format can be chosen for the desired therapeutic application. In some cases, an immunomodulatory polypeptide comprising a variant PD-L1 polypeptide is provided in a format to antagonize or block activity of its cognate binding partner, e.g. PD-1. In some embodiments, antagonism of PD-1 may be useful to promote immunity in oncology. In some cases, an immunomodulatory polypeptide comprising a variant PD-L1 polypeptide is provided in a format to agonize or stimulate activity of its cognate binding partner, e.g. PD-1. In some embodiments, agonism of PD-1 may be useful for treating inflammation or autoimmunity. A skilled artisan can readily determine the activity of a particular format, such as for antagonizing or agonizing one or more specific cognate binding partner. Exemplary methods for assessing such activities are provided herein, including in the examples.

[0198] In some aspects, provided are immunomodulatory proteins comprising a vIgD of PD-L1 in which such proteins are soluble, e.g. fused to an Fc chain. In some aspects, one or more additional IgSF domain, such as one or more additional vIgD, may be linked to a vIgD of PD-L1 as provided herein (hereinafter called a “stack” or “stacked” immunomodulatory protein). In some embodiments, the modular format of the provided immunomodulatory proteins provides flexibility for engineering or generating immunomodulatory proteins for modulating activity of multiple counterstructures (multiple cognate binding partners). In some embodiments, such “stack” molecules can be provided in a soluble format or, in some cases, may be provided as membrane bound or secreted proteins. In some embodiments, a variant PD-L1 immunomodulatory protein is provided as a conjugate in which is contained a vIgD of PD-L1 linked, directly or indirectly, to a targeting agent or moiety, e.g. to an antibody or other binding molecules that specifically binds to a ligand, e.g. an antigen, for example, for targeting or localizing the vIgD to a specific environment or cell, such as when administered to a subject. In some embodiments, the targeting agent, e.g. antibody or other binding molecule, binds to a tumor antigen, thereby localizing the variant PD-L1 containing the vIgD to the tumor microenvironment, for example, to modulate activity of tumor infiltrating lymphocytes (TILs) specific to the tumor microenvironment. In some embodiments, the targeting agent, e.g. antibody or other binding molecule, binds to an antigen expressed on antigen presenting cells or normal tissue in an inflammatory environment, thereby localizing the variant PD-L1 containing the vIgD to areas of unwanted autoimmune inflammation, for example, to modulate activity of T cells targeting self antigen.

[0199] In some embodiments, provided immunomodulatory proteins are expressed in cells and provided as part of an engineered cellular therapy (ECT). In some embodiments, the variant PD-L1 polypeptide is expressed in a cell, such as an immune cell (e.g. T cell or antigen presenting cell), in membrane-bound form, thereby providing a transmembrane immunomodulatory protein (hereinafter also called a “TIP”). In some embodiments, depending on the cognate binding partner recognized by the TIP, engineered cells expressing a TIP can agonize a cognate binding partner by providing a costimulatory signal, either positive to negative, to other engineered cells and/or to endogenous T cells. In some aspects, the variant PD-L1 polypeptide is expressed in a cell, such as an immune cell (e.g. T cell or antigen presenting cell), in secretable form to thereby produce a secreted or soluble form of the variant PD-L1 polypeptide (hereinafter also called a “SIP”), such as when the cells are administered to a subject. In some aspects, a SIP can antagonize a cognate binding partner in the environment (e.g. tumor microenvironment) in which it is secreted. In some embodiments, a variant PD-L1 polypeptide is expressed in an infectious agent (e.g. viral or bacterial agent) which, upon administration to a subject, is able to infect a cell in vivo, such as an immune cell (e.g. T cell or antigen presenting cell), for delivery or expression of the variant polypeptide as a TIP or a SIP in the cell.

[0200] In some embodiments, a soluble immunomodulatory polypeptide, such as a variant PD-L1 containing a vIgD, can be encapsulated within a liposome which itself can be conjugated to any one of or any combination of the provided conjugates (e.g., a targeting moiety). In some embodiments, the soluble or membrane bound immunomodulatory polypeptides of the invention are deglycosylated. In more specific embodiments, the variant PD-L1 sequence is deglycosylated. In even more specific embodiments, the IgV and/or IgC (e.g. IgC2) domain or domains of the variant PD-L1 is deglycosylated.

[0201] Non-limiting examples of provided formats are described in FIGS. 1A-1C and further described below.

[0202] A. Soluble Protein

[0203] In some embodiments, the immunomodulatory protein containing a variant PD-L1 polypeptide is a soluble protein. Those of skill will appreciate that cell surface proteins typically have an intracellular, transmembrane, and extracellular domain (ECD) and that a soluble form of such proteins can be made using the extracellular domain or an immunologically active subsequence thereof. Thus, in some embodiments, the immunomodulatory protein containing a variant PD-L1 polypeptide lacks a transmembrane domain or a portion of the transmembrane domain. In some embodiments, the immunomodulatory protein containing a variant PD-L1 lacks the intracellular (cytoplasmic) domain or a portion of the intracellular domain. In some embodiments, the immunomodulatory protein containing the variant PD-L1 polypeptide only contains the vIgD portion containing the ECD domain or a portion thereof containing an IgV domain and/or IgC (e.g. IgC2) domain or domains or specific binding fragments thereof containing the amino acid modification(s).

[0204] In some embodiments, the immunomodulatory protein is or contains a variant PD-L1 polypeptide that is in monomer form and/or that exhibits monovalent binding to its binding partner. In some aspects, a variant PD-L1 polypeptide as described, such as a variant PD-L1 that is soluble and/or that lacks a transmembrane domain and intracellular signaling domain, is linked, directly or indirectly, to a further moiety. In some embodiments, the further moiety is a protein, peptide, small molecule or nucleic acid. In some embodiments, the monovalent immunomodulatory protein is a fusion protein. In some embodiments, the moiety is a half-life extending molecule. Exemplary of such half-life extending molecules include, but are not limited to, albumin, an albumin-binding polypeptide, Pro/Ala/Ser (PAS), a C-terminal peptide (CTP) of the beta subunit of human chorionic gonadotropin, polyethylene glycol (PEG), long unstructured hydrophilic sequences of amino acids (XTEN), hydroxyethyl starch (HES), an albumin-binding small molecule, or a combination thereof.

[0205] In some embodiments, the immunomodulatory polypeptide comprising a variant PD-L1 can be linked to a moiety that includes conformationally disordered polypeptide sequences composed of the amino acids Pro, Ala, and Ser (See e.g., WO2008/155134, SEQ ID NO: 2025). In some cases, the amino acid repeat is at least 3, 4, 5, 6, 7, 8, 9, 10, 11, 12, 13, 14, 15, 16, 17, 18, 19, 20, 21, 22, 23, 24, 25, 26, 27, 28, 29, 30 or more amino acid residues, wherein each repeat comprises (an) Ala, Ser, and Pro residue(s). Thus, provided herein is an immunomodulatory protein is a PASylated protein wherein the variant PD-L1 polypeptide is linked, directly or indirectly via a linker, to Pro/Ala/Ser (PAS). In some embodiments, one or more additional linker structures may be used.

[0206] In some embodiments, the moiety facilitates detection or purification of the variant PD-L1 polypeptide. In some cases, the immunomodulatory polypeptide comprises a tag or fusion domain, e.g. affinity or purification tag, linked, directly or indirectly, to the N- and/or c-terminus of the PD-L1 polypeptide. Various suitable polypeptide tags and/or fusion domains are known, and include but are not limited to, a poly-histidine (His) tag, a FLAG-tag (SEQ ID NO: 2010), a Myc-tag, and fluorescent protein-tags (e.g., EGFP, set forth in SEQ ID NOs: 2027-2029). In some cases, the immunomodulatory polypeptide comprising a variant PD-L1 comprises at least six histidine residues (set forth in SEQ ID NO: 2011). In some cases, the immunomodulatory polypeptide comprising a variant PD-L1 further comprises various combinations of moieties. For example, the immunomodulatory polypeptide comprising a variant PD-L1 further comprises one or more polyhistidine-tag and FLAG tag.

[0207] In some embodiments, the PD-L1 polypeptide is linked to a modified immunoglobulin heavy chain constant region (Fc) that remains in monovalent form such as set forth in SEQ ID NO: 1187.

[0208] In some embodiments, the immunomodulatory protein contains a variant PD-L1 polypeptide that is linked, directly or indirectly via a linker to a multimerization domain. In some aspects, the multimerization domain increases half-life of the molecule. Interaction of two or more variant PD-L1 polypeptides can be facilitated by their linkage, either directly or indirectly, to any moiety or other polypeptide that are themselves able to interact to form a stable structure. For example, separate encoded variant PD-L1 polypeptide chains can be joined by multimerization, whereby multimerization of the polypeptides is mediated by a multimerization domain. Typically, the multimerization domain provides for the formation of a stable protein-protein interaction between a first variant PD-L1 polypeptide and a second variant PD-L1 polypeptide.

[0209] Homo- or heteromultimeric polypeptides can be generated from co-expression of separate variant PD-L1 polypeptides. The first and second variant PD-L1 polypeptides can be the same or different. In particular embodiments, the first and second variant PD-L1 polypeptide are the same in a homodimer, and each are linked to a multimerization domain that is the same. In other embodiments, heterodimers can be formed by linking first and second variant PD-L1 polypeptides that are different. In such embodiments, in some aspects the first and second variant PD-L1 polypeptide are linked to different multimerization domains capable of promoting heterodimer formation.

[0210] In some embodiments, a multimerization domain includes any capable of forming a stable protein-protein interaction. The multimerization domains can interact via an immunoglobulin sequence (e.g. Fc domain; see e.g., International Patent Pub. Nos. WO 93/10151 and WO 2005/063816 US; U.S. Pub. No. 2006/0024298; U.S. Pat. No. 5,457,035); leucine zipper (e.g. from nuclear transforming proteins fos and jun or the proto-oncogene c-myc or from General Control of Nitrogen (GCN4)) (ee e.g., Busch and Sassone-Corsi (1990) Trends Genetics, 6:36-40; Gentz et al., (1989) Science, 243:1695-1699); a hydrophobic region; a hydrophilic region; or a free thiol which forms an intermolecular disulfide bond between the chimeric molecules of a homo- or heteromultimer. In addition, a multimerization domain can include an amino acid sequence comprising a protuberance complementary to an amino acid sequence comprising a hole, such as is described, for example, in U.S. Pat. No. 5,731,168; International Patent Pub. Nos. WO 98/50431 and WO 2005/063816; Ridgway et al. (1996) Protein Engineering, 9:617-621. Such a multimerization region can be engineered such that steric interactions not only promote stable interaction, but further promote the formation of heterodimers over homodimers from a mixture of chimeric monomers. Generally, protuberances are constructed by replacing small amino acid side chains from the interface of the first polypeptide with larger side chains (e.g., tyrosine or tryptophan). Compensatory cavities of identical or similar size to the protuberances are optionally created on the interface of the second polypeptide by replacing large amino acid side chains with smaller ones (e.g., alanine or threonine). Exemplary multimerization domains are described below.

[0211] The variant PD-L1 polypeptide can be joined anywhere, but typically via its N- or C-terminus, to the N- or C-terminus of a multimerization domain to form a chimeric polypeptide. The linkage can be direct or indirect via a linker. The chimeric polypeptide can be a fusion protein or can be formed by chemical linkage, such as through covalent or non-covalent interactions. For example, when preparing a chimeric polypeptide containing a multimerization domain, nucleic acid encoding all or part of a variant PD-L1 polypeptide can be operably linked to nucleic acid encoding the multimerization domain sequence, directly or indirectly or optionally via a linker domain. In some cases, the construct encodes a chimeric protein where the C-terminus of the variant PD-L1 polypeptide is joined to the N-terminus of the multimerization domain. In some instances, a construct can encode a chimeric protein where the N-terminus of the variant PD-L1 polypeptide is joined to the C-terminus of the multimerization domain.

[0212] A polypeptide multimer contains multiple, such as two, chimeric proteins created by linking, directly or indirectly, two of the same or different variant PD-L1 polypeptides directly or indirectly to a multimerization domain. In some examples, where the multimerization domain is a polypeptide, a gene fusion encoding the variant PD-L1 polypeptide and multimerization domain is inserted into an appropriate expression vector. The resulting chimeric or fusion protein can be expressed in host cells transformed with the recombinant expression vector, and allowed to assemble into multimers, where the multimerization domains interact to form multivalent polypeptides. Chemical linkage of multimerization domains to variant PD-L1 polypeptides can be effected using heterobifunctional linkers.

[0213] The resulting chimeric polypeptides, such as fusion proteins, and multimers formed therefrom, can be purified by any suitable method such as, for example, by affinity chromatography over Protein A or Protein G columns. Where two nucleic acid molecules encoding different polypeptides are transformed into cells, formation of homo- and heterodimers will occur. Conditions for expression can be adjusted so that heterodimer formation is favored over homodimer formation.

[0214] In some embodiments, the multimerization domain is an Fc domain or portions thereof from an immunoglobulin. In some embodiments, the immunomodulatory protein comprises a variant PD-L1 polypeptide attached to an immunoglobulin Fc (yielding an “immunomodulatory Fc fusion,” such as a “PD-L1-Fc variant fusion,” also termed a PD-L1 vIgD-Fc fusion). In some embodiments, the attachment of the variant PD-L1 polypeptide is at the N-terminus of the Fc. In some embodiments, the attachment of the variant PD-L1 polypeptide is at the C-terminus of the Fc. In some embodiments, two or more PD-L1 variant polypeptides (the same or different) are independently attached at the N-terminus and at the C-terminus.

[0215] In some embodiments, the Fc is murine or human Fc. In some embodiments, the Fc is a mammalian or human IgG1, 1gG2, 1gG3, or 1gG4 Fc regions. In some embodiments, the Fc is derived from IgG1, such as human IgG1. In some embodiments, the Fc comprises the amino acid sequence set forth in SEQ ID NO: 187 or a sequence of amino acids that exhibits at least 85%, 86%, 87%, 88%, 89%, 90%, 91%, 92%, 93%, 94%, 95%, 96%, 97%, 98%, 99% or more sequence identity to SEQ ID NO: 187.

[0216] In some embodiments, the Fc region contains one more modifications to alter (e.g. reduce) one or more of its normal functions. In general, the Fc region is responsible for effector functions, such as complement-dependent cytotoxicity (CDC) and antibody-dependent cell cytotoxicity (ADCC), in addition to the antigen-binding capacity, which is the main function of immunoglobulins. In some cases, effector functions of an Fc region can include programmed cell death and cellular phagocytosis. Additionally, the FcRn sequence present in the Fc region plays the role of regulating the IgG level in serum by increasing the in vivo half-life by conjugation to an in vivo FcRn receptor. In some embodiments, such functions can be reduced or altered in an Fc for use with the provided Fc fusion proteins.

[0217] In some embodiments, one or more amino acid modifications may be introduced into the Fc region of a PD-L1-Fc variant fusion provided herein, thereby generating an Fc region variant. In some embodiments, the Fc region variant has decreased effector function. There are many examples of changes or mutations to Fc sequences that can alter effector function. For example, WO 00/42072, WO2006019447, WO2012125850, WO2015/107026, US2016/0017041 and Shields et al. J Biol. Chem. 9(2): 6591-6604 (2001) describe exemplary Fc variants with improved or diminished binding to FcRs. The contents of those publications are specifically incorporated herein by reference.

[0218] In some embodiments, the provided variant PD-L1-Fc fusions comprise an Fc region that exhibits reduced effector functions, which makes it a desirable candidate for applications in which the half-life of the PD-L1-Fc variant fusion in vivo is important yet certain effector functions (such as CDC and ADCC) are unnecessary or deleterious. In vitro and/or in vivo cytotoxicity assays can be conducted to confirm the reduction/depletion of CDC and/or ADCC activities. For example, Fc receptor (FcR) binding assays can be conducted to ensure that the PD-L1-Fc variant fusion lacks FcγR binding (hence likely lacking ADCC activity), but retains FcRn binding ability. The primary cells for mediating ADCC, NK cells, express FcγRIII only, whereas monocytes express FcγRI, FcγRII and FcγRIII. FcR expression on hematopoietic cells is summarized in Table 2 on page 464 of Ravetch and Kinet, Annu. Rev. Immunol. 9:457-492 (1991). Non-limiting examples of in vitro assays to assess ADCC activity of a molecule of interest is described in U.S. Pat. No. 5,500,362 (see, e.g. Hellstrom, I. et al. Proc. Nat'l Acad. Sci. USA 83:7059-7063 (1986)) and Hellstrom, I et al., Proc. Nat'l Acad. Sci. USA 82:1499-1502 (1985); U.S. Pat. No. 5,821,337 (see Bruggemann, M. et al., J. Exp. Med. 166:1351-1361 (1987)). Alternatively, non-radioactive assay methods may be employed (see, for example, ACTI™ non-radioactive cytotoxicity assay for flow cytometry (CellTechnology, Inc. Mountain View, Calif.; and CytoTox 96™ non-radioactive cytotoxicity assay (Promega, Madison, Wis.). Useful effector cells for such assays include peripheral blood mononuclear cells (PBMC) and Natural Killer (NK) cells. Alternatively, or additionally, ADCC activity of the molecule of interest may be assessed in vivo, e.g., in an animal model such as that disclosed in Clynes et al. Proc. Nat'l Acad. Sci. USA 95:652-656 (1998). C1q binding assays may also be carried out to confirm that the PD-L1-Fc variant fusion is unable to bind C1q and hence lacks CDC activity. See, e.g., C1q and C3c binding ELISA in WO 2006/029879 and WO 2005/100402. To assess complement activation, a CDC assay may be performed (see, for example, Gazzano-Santoro et al., J. Immunol. Methods 202:163 (1996); Cragg, M. S. et al., Blood 101:1045-1052 (2003); and Cragg, M. S. and M. J. Glennie, Blood 103:2738-2743 (2004)). FcRn binding and in vivo clearance/half-life determinations can also be performed using methods known in the art (see, e.g., Petkova, S. B. et al., Int'l. Immunol. 18(12):1759-1769 (2006)).

[0219] PD-L1-Fc variant fusions with reduced effector function include those with substitution of one or more of Fc region residues 238, 265, 269, 270, 297, 327 and 329 by EU numbering (U.S. Pat. No. 6,737,056). Such Fc mutants include Fc mutants with substitutions at two or more of amino acid positions 265, 269, 270, 297 and 327 by EU numbering, including the so-called “DANA” Fc mutant with substitution of residues 265 and 297 to alanine (U.S. Pat. No. 7,332,581).

[0220] In some embodiments, the Fc region of PD-L1-Fc variant fusions has an Fc region in which any one or more of amino acids at positions 234, 235, 236, 237, 238, 239, 270, 297, 298, 325, and 329 (indicated by EU numbering) are substituted with different amino acids compared to the native Fc region. Such alterations of Fc region are not limited to the above-described alterations, and include, for example, alterations such as deglycosylated chains (N297A and N297Q), IgG1-N297G, IgG1-L234A/L235A, IgG1-L234A/L235E/G237A, IgG1-A325A/A330S/P331S, IgG1-C226S/C229S, IgG1-C226S/C229S/E233P/L234V/L235A, IgG1-E233P/L234V/L235A/G236del/S267K, IgG1-L234F/L235E/P331S, IgG1-S267E/L328F, IgG2-V234A/G237A, IgG2-H268Q/V309L/A330S/A331S, IgG4-L235A/G237A/E318A, and IgG4-L236E described in Current Opinion in Biotechnology (2009) 20 (6), 685-691; alterations such as G236R/L328R, L235G/G236R, N325A/L328R, and N325LL328R described in WO 2008/092117; amino acid insertions at positions 233, 234, 235, and 237 (indicated by EU numbering); and alterations at the sites described in WO 2000/042072.

[0221] Certain Fc variants with improved or diminished binding to FcRs are described. (See, e.g., U.S. Pat. No. 6,737,056; WO 2004/056312, WO2006019447 and Shields et al., J. Biol. Chem. 9(2): 6591-6604 (2001).)

[0222] In some embodiments, there is provided a PD-L1-Fc variant fusion comprising a variant Fc region comprising one or more amino acid substitutions which increase half-life and/or improve binding to the neonatal Fc receptor (FcRn). Antibodies with increased half-lives and improved binding to FcRn are described in US2005/0014934A1 (Hinton et al.) or WO2015107026. Those antibodies comprise an Fc region with one or more substitutions therein which improve binding of the Fc region to FcRn. Such Fc variants include those with substitutions at one or more of Fc region residues: 238, 256, 265, 272, 286, 303, 305, 307, 311, 312, 317, 340, 356, 360, 362, 376, 378, 380, 382, 413, 424 or 434 by EU numbering, e.g., substitution of Fc region residue 434 (U.S. Pat. No. 7,371,826).

[0223] In some embodiments, the Fc region of a PD-L1-Fc variant fusion comprises one or more amino acid substitution E356D and M358L by EU numbering. In some embodiments, the Fc region of a PD-L1-Fc variant fusion comprises one or more amino acid substitutions C220S, C226S and/or C229S by EU numbering. In some embodiments, the Fc region of a PD-L1 variant fusion comprises one or more amino acid substitutions R292C and V302C. See also Duncan & Winter, Nature 322:738-40 (1988); U.S. Pat. Nos. 5,648,260; 5,624,821; and WO 94/29351 concerning other examples of Fc region variants.

[0224] In some embodiments, alterations are made in the Fc region that result in diminished C1q binding and/or Complement Dependent Cytotoxicity (CDC), e.g., as described in U.S. Pat. No. 6,194,551, WO 99/51642, and Idusogie et al., J. Immunol. 164: 4178-4184 (2000).

[0225] In some embodiments, there is provided a PD-L1-Fc variant fusion comprising a variant Fc region comprising one or more amino acid modifications, wherein the variant Fc region is derived from IgG1, such as human IgG1. In some embodiments, the variant Fc region is derived from the amino acid sequence set forth in SEQ ID NO: 187. In some embodiments, the Fc contains at least one amino acid substitution that is N82G by numbering of SEQ ID NO: 187 (corresponding to N297G by EU numbering). In some embodiments, the Fc further contains at least one amino acid substitution that is R77C or V87C by numbering of SEQ ID NO: 187 (corresponding to R292C or V302C by EU numbering). In some embodiments, the variant Fc region further comprises a C5S amino acid modification by numbering of SEQ ID NO: 187 (corresponding to C220S by EU numbering). For example, in some embodiments, the variant Fc region comprises the following amino acid modifications: V297G and one or more of the following amino acid modifications C220S, R292C or V302C by EU numbering (corresponding to N82G and one or more of the following amino acid modifications C5S, R77C or V87C with reference to SEQ ID NO:187), e.g., the Fc region comprises the sequence set forth in SEQ ID NO:1157. In some embodiments, the variant Fc region comprises one or more of the amino acid modifications C220S, L234A, L235E or G237A, e.g. the Fc region comprises the sequence set forth in SEQ ID NO:1158. In some embodiments, the variant Fc region comprises one or more of the amino acid modifications C220S, L235P, L234V, L235A, G236del or S267K, e.g. the Fc region comprises the sequence set forth in SEQ ID NO:1159. In some embodiments, the variant Fc comprises one or more of the amino acid modifications C220S, L234A, L235E, G237A, E356D or M358L, e.g. the Fc region comprises the sequence set forth in SEQ ID NO:1155.

[0226] In some embodiments, the Fc region lacks the C-terminal lysine corresponding to position 232 of the wild-type or unmodified Fc set forth in SEQ ID NO: 187 (corresponding to K447del by EU numbering). In some aspects, such an Fc region can additionally include one or more additional modifications, e.g. amino acid substitutions, such as any as described. Exemplary of such an Fc region is set forth in SEQ ID NO: 1938, 1939, 1940, or 1715.

[0227] In some embodiments, there is provided a PD-L1-Fc variant fusion comprising a variant Fc region in which the variant Fc comprises the sequence of amino acids set forth in any of SEQ ID NOS:1155, 1157, 1158, 1159, 1715, 1938, 1939, or 1940 or a sequence of amino acids that exhibits at least 85%, 86%, 87%, 88%, 89%, 90%, 91%, 92%, 93%, 94%, 95%, 96%, 97%, 98%, 99% or more sequence identity to any of SEQ ID NOS: 1155, 1157, 1158, 1159, 1715, 1938, 1939, or 1940.

[0228] In some embodiments, the Fc is derived from IgG2, such as human IgG2. In some embodiments, the Fc comprises the amino acid sequence set forth in SEQ ID NO: 188 or a sequence of amino acids that exhibits at least 85%, 86%, 87%, 88%, 89%, 90%, 91%, 92%, 93%, 94%, 95%, 96%, 97%, 98%, 99% or more sequence identity to SEQ ID NO: 188.

[0229] In some embodiments, the Fc comprises the amino acid sequence set forth in SEQ ID NO: 1200 or a sequence of amino acids that exhibits at least 85%, 86%, 87%, 88%, 89%, 90%, 91%, 92%, 93%, 94%, 95%, 96%, 97%, 98%, 99% or more sequence identity to SEQ ID NO: 1200. In some embodiments, the IgG4 Fc is a stabilized Fc in which the CH3 domain of human IgG4 is substituted with the CH3 domain of human IgG1 and which exhibits inhibited aggregate formation, an antibody in which the CH3 and CH2 domains of human IgG4 are substituted with the CH3 and CH2 domains of human IgG1, respectively, or an antibody in which arginine at position 409 indicated in the EU index proposed by Kabat et al. of human IgG4 is substituted with lysine and which exhibits inhibited aggregate formation (see e.g. U.S. Pat. No. 8,911,726. In some embodiments, the Fc is an IgG4 containing the S228P mutation, which has been shown to prevent recombination between a therapeutic antibody and an endogenous IgG4 by Fab-arm exchange (see e.g. Labrijin et al. (2009) Nat. Biotechnol., 27(8): 767-71.) In some embodiments, the Fc comprises the amino acid sequence set forth in SEQ ID NO: 1201 or a sequence of amino acids that exhibits at least 85%, 86%, 87%, 88%, 89%, 90%, 91%, 92%, 93%, 94%, 95%, 96%, 97%, 98%, 99% or more sequence identity to SEQ ID NO: 1201.

[0230] In some embodiments, the variant PD-L1 polypeptide is directly linked to the Fc sequence. In some embodiments, the variant PD-L1 polypeptide is indirectly linked to the Fc sequence, such as via a linker. In some embodiments, one or more “peptide linkers” link the variant PD-L1 polypeptide and the Fc domain. In some embodiments, a peptide linker can be a single amino acid residue or greater in length. In some embodiments, the peptide linker has at least one amino acid residue but is no more than 20, 19, 18, 17, 16, 15, 14, 13, 12, 11, 10, 9, 8, 7, 6, 5, 4, 3, 2, or 1 amino acid residues in length. In some embodiments, the linker is three alanines (AAA). In some embodiments, the linker is a flexible linker. In some embodiments, the linker is (in one-letter amino acid code): GGGGS (“4GS” or “G₄S”; SEQ ID NO: 1942) or multimers of the 4GS linker, such as repeats of 2, 3, 4, or 5 4GS linkers, such as set forth in SEQ ID NO: 240 (2×GGGGS) or SEQ ID NO:239 (3×GGGGS). In some embodiments, the linker (in one-letter amino acid code) is GSGGGGS (SEQ ID NO:1941). In some embodiments, the linker also can include a series of alanine residues alone or in addition to another peptide linker (such as a 4GS linker or multimer thereof). In some embodiments, the number of alanine residues in each series is: 2, 3, 4, 5, or 6 alanines. In some embodiments, the linker is a rigid linker. For example, the linker is an α-helical linker. In some embodiments, the linker is (in one-letter amino acid code): EAAAK or multimers of the EAAAK linker, such as repeats of 2, 3, 4, or 5 EAAAK linkers, such as set forth in SEQ ID NO: 2022 (1×EAAAK), SEQ ID NO: 2023 (3×EAAAK) or SEQ ID NO: 2024 (5×EAAAK). In some embodiments, the linker can further include amino acids introduced by cloning and/or from a restriction site, for example the linker can include the amino acids GS (in one-letter amino acid code) as introduced by use of the restriction site BAMHI. For example, in some embodiments, the linker (in one-letter amino acid code) is GSGGGGS (SEQ ID NO:1941), GS(G₄S)₃ (SEQ ID NO: 2031), or GS(G₄S)₅ (SEQ ID NO: 2032). In some examples, the linker is a 2×GGGGS followed by three alanines (GGGGSGGGGSAAA; SEQ ID NO: 241). In some cases, the immunomodulatory polypeptide comprising a variant PD-L1 comprises various combinations of peptide linkers.

[0231] In some embodiments, the variant PD-L1-Fc fusion protein is a dimer formed by two variant PD-L1 Fc polypeptides linked to an Fc domain. In some embodiments, the dimer is a homodimer in which the two variant PD-L1 Fc polypeptides are the same. In some embodiments, the dimer is a heterodimer in which the two variant PD-L1 Fc polypeptides are different.

[0232] Also provided are nucleic acid molecules encoding the variant PD-L1-Fc fusion protein. In some embodiments, for production of an Fc fusion protein, a nucleic acid molecule encoding a variant PD-L1-Fc fusion protein is inserted into an appropriate expression vector. The resulting variant PD-L1-Fc fusion protein can be expressed in host cells transformed with the expression where assembly between Fc domains occurs by interchain disulfide bonds formed between the Fc moieties to yield dimeric, such as divalent, variant PD-L1-Fc fusion proteins.

[0233] The resulting Fc fusion proteins can be easily purified by affinity chromatography over Protein A or Protein G columns. For the generation of heterodimers, additional steps for purification can be necessary. For example, where two nucleic acids encoding different variant PD-L1 polypeptides are transformed into cells, the formation of heterodimers must be biochemically achieved since variant PD-L1 molecules carrying the Fc-domain will be expressed as disulfide-linked homodimers as well. Thus, homodimers can be reduced under conditions that favor the disruption of interchain disulfides, but do no effect intra-chain disulfides. In some cases, different variant-PD-L1 Fc monomers are mixed in equimolar amounts and oxidized to form a mixture of homo- and heterodimers. The components of this mixture are separated by chromatographic techniques. Alternatively, the formation of this type of heterodimer can be biased by genetically engineering and expressing Fc fusion molecules that contain a variant PD-L1 polypeptide using knob-into-hole methods described below.

[0234] B. Stack Molecules with Additional IgSF Domains

[0235] In some embodiments, the immunomodulatory proteins can contain any of the variant PD-L1 polypeptides provided herein linked, directly or indirectly, to one or more other immunoglobulin superfamily (IgSF) domain (“stacked” immunomodulatory protein construct and also called a “Type II” immunomodulatory protein). In some aspects, this can create unique multi-domain immunomodulatory proteins that bind two or more, such as three or more, cognate binding partners, thereby providing a multi-targeting modulation of the immune synapse.

[0236] In some embodiments, an immunomodulatory protein comprises a combination (a “non-wild-type combination”) and/or arrangement (a “non-wild type arrangement” or “non-wild-type permutation”) of a variant PD-L1 domain with one or more other affinity modified and/or non-affinity modified IgSF domain sequences of another IgSF family member (e.g. a mammalian IgSF family member) that are not found in wild-type IgSF family members. In some embodiments, the immunomodulatory protein contains 2, 3, 4, 5 or 6 immunoglobulin superfamily (IgSF) domains, where at least one of the IgSF domain is a variant PD-L1 IgSF domain (vIgD of PD-L1) according to the provided description.

[0237] In some embodiments, the sequences of the additional IgSF domains can be a modified IgSF domain that contains one or more amino acid modifications, e.g. substitutions, compared to a wildtype or unmodified IgSF domain. In some embodiments, the IgSF domain can be non-affinity modified (e.g., wild-type) or have been affinity modified. In some embodiments, the unmodified or wild-type IgSF domain can be from mouse, rat, cynomolgus monkey, or human origin, or combinations thereof. In some embodiments, the additional IgSF domains can be an IgSF domain of an IgSF family member set forth in Table 2. In some embodiments, the additional IgSF domain can be an affinity-modified IgSF domain containing one or more amino acid modifications, e.g. substitutions, compared to an IgSF domain contained in an IgSF family member set forth in Table 2.

[0238] In some embodiments, the additional IgSF domain is an affinity or non-affinity modified IgSF domain contained in an IgSF family member of a family selected from Signal-Regulatory Protein (SIRP) Family, Triggering Receptor Expressed On Myeloid Cells Like (TREML) Family, Carcinoembryonic Antigen-related Cell Adhesion Molecule (CEACAM) Family, Sialic Acid Binding Ig-Like Lectin (SIGLEC) Family, Butyrophilin Family, B7 family, CD28 family, V-set and Immunoglobulin Domain Containing (VSIG) family, V-set transmembrane Domain (VSTM) family, Major Histocompatibility Complex (MHC) family, Signaling lymphocytic activation molecule (SLAM) family, Leukocyte immunoglobulin-like receptor (LIR), Nectin (Nec) family, Nectin-like (NECL) family, Poliovirus receptor related (PVR) family, Natural cytotoxicity triggering receptor (NCR) family, T cell immunoglobulin and mucin (TIM) family or Killer-cell immunoglobulin-like receptors (KIR) family. In some embodiments, the additional IgSF domains are independently derived from an IgSF protein selected from the group consisting of CD80(B7-1), CD86(B7-2), CD274 (PD-L1, B7-H1), PDCD1LG2(PD-L2, CD273), ICOSLG(B7RP1, CD275, ICOSL, B7-H2), CD276(B7-H3), VTCN1(B7-H4), CD28, CTLA4, PDCD1(PD-1), ICOS, BTLA(CD272), CD4, CD8A(CD8-alpha), CD8B(CD8-beta), LAG3, HAVCR2(TIM-3), CEACAM1, TIGIT, PVR(CD155), PVRL2(CD112), CD226, CD2, CD160, CD200, CD200R1(CD200R), NCR3 (NKp30), and VSIG8.

[0239] The first column of Table 2 provides the name and, optionally, the name of some possible synonyms for that particular IgSF member. The second column provides the protein identifier of the UniProtKB database, a publicly available database accessible via the internet at uniprot.org or, in some cases, the GenBank Number. The Universal Protein Resource (UniProt) is a comprehensive resource for protein sequence and annotation data. The UniProt databases include the UniProt Knowledgebase (UniProtKB). UniProt is a collaboration between the European Bioinformatics Institute (EMBL-EBI), the SIB Swiss Institute of Bioinformatics and the Protein Information Resource (PIR) and supported mainly by a grant from the U.S. National Institutes of Health (NIH). GenBank is the NIH genetic sequence database, an annotated collection of all publicly available DNA sequences (Nucleic Acids Research, 2013 January; 41(D1):D36-42). The third column provides the region where the indicated IgSF domain is located. The region is specified as a range where the domain is inclusive of the residues defining the range. Column 3 also indicates the IgSF domain class for the specified IgSF region. Column 4 provides the region where the indicated additional domains are located (signal peptide, S; extracellular domain, E; transmembrane domain, T; cytoplasmic domain, C). It is understood that description of domains can vary depending on the methods used to identify or classify the domain, and may be identified differently from different sources. The description of residues corresponding to a domain in Table 2 is for exemplification only and can be several amino acids (such as one, two, three or four) longer or shorter. Column 5 indicates for some of the listed IgSF members, some of its cognate cell surface binding partners.

TABLE 2
IgSF members according to the present disclosure.

| | NCBI | | | | | | |
|---|---|---|---|---|---|---|---|
| | Protein | | | | | | |
| | Accession | | | | IgSF Member Amino Acid Sequence | | |
| | Number/ | | | Cognate Cell | (SEQ ID NO) | | |
| IgSF | UniProtKB | IgSF Region | | Surface | Precursor | | |
| Member | Protein | & Domain | Other | Binding | (mature | | |
| (Synonyms) | Identifier | Class | Domains | Partners | residues) | Mature | ECD |
| CD80 | NP_005182.1 | 35-135, 35- | S: 1-34, | CD28, CTLA4, | SEQ ID NO: 1 | SEQ ID | SEQ ID |
| (B7-1) | P33681 | 138, 37-138, or | E: 35-242, | PD-L1 | (35-288) | NO: 189 | NO: 28 |
| | | 35-141 IgV, | T: 243-263, | | | | |
| | | 145-230 or | C: 264-288 | | | | |
| | | 154-232 IgC | | | | | |
| CD86 | P42081.2 | 33-131 IgV, | S: 1-23, | CD28, CTLA4 | SEQ ID NO: 2 | SEQ ID | SEQ ID |
| (B7-2) | | 150-225 IgC2 | E: 24-247, | | (24-329) | NO: 190 | NO: 29 |
| | | | T: 248-268, | | | | |
| | | | C: 269-329 | | | | |
| CD274 | Q9NZQ7.1 | 24-130 or 19- | S: 1-18, | PD-1, B7-1 | SEQ ID NO: 3 | SEQ ID | SEQ ID |
| (PD-L1, | NP_054862.1 | 127 IgV, | E: 19-238, | | (19-290) | NO: 191 | NO: 30 |
| B7-H1) | | 133-225 IgC2 | T: 239-259, | | | | |
| | | | C: 260-290 | | | | |
| PDCD1LG2 | Q9BQ51.2 | 21-118 IgV, | S: 1-19, | PD-1, RGMb | SEQ ID NO: 4 | SEQ ID | SEQ ID |
| (PD-L2, | | 122-203 IgC2 | E: 20-220, | | (20-273) | NO: 192 | NO: 31 |
| CD273) | | | T: 221-241, | | | | |
| | | | C: 242-273 | | | | |
| ICOSLG | O75144.2 | 19-129 IgV, | S: 1-18, | ICOS, CD28, | SEQ ID NO: 5 | SEQ ID | SEQ ID |
| (B7RP1, | | 141-227 IgC2 | E: 19-256, | CTLA4 | (19-302) | NO: 193 | NO: 32 |
| CD275, | | | T: 257-277, | | | | |
| ICOSL, B7- | | | C: 278-302 | | | | |
| H2) | | | | | | | |
| CD276 | Q5ZPR3.1 | 29-139 IgV, | S: 1-28, | | SEQ ID NO: 6 | SEQ ID | SEQ ID |
| (B7-H3) | | 145-238 IgC2, | E: 29-466, | | (29-534) | NO: 194 | NO: 33 |
| | | 243-357 IgV2, | T: 467-487, | | | | |
| | | 363-456, 367- | C: 488-534 | | | | |
| | | 453 IgC2 | | | | | |
| VTCN1 | Q7Z7D3.1 | 35-146 IgV, | S: 1-24, | | SEQ ID NO: 7 | SEQ ID | SEQ ID |
| (B7-H4) | | 153-241 IgV | E: 25-259, | | (25-282) | NO: 195 | NO: 34 |
| | | | T: 260-280, | | | | |
| | | | C: 281-282 | | | | |
| CD28 | P10747.1 | 28-137 IgV | S: 1-18, | B7-1, B7-2, | SEQ ID NO: 8 | SEQ ID | SEQ ID |
| | | | E: 19-152, | B7RP1 | (19-220) | NO: 196 | NO: 35 |
| | | | T: 153-179, | | | | |
| | | | C: 180-220 | | | | |
| CTLA-4 | P16410.3 | 39-140 IgV | S: 1-35, | B7-1, B7-2, | SEQ ID NO: 9 | SEQ ID | SEQ ID |
| | | | E: 36-161, | B7RP1 | (36-223) | NO: 197 | NO: 36 |
| | | | T: 162-182, | | | | |
| | | | C: 183-223 | | | | |
| PDCD1 | Q15116.3 | 35-145 IgV | S: 1-20, | PD-L1, PD-L2 | SEQ ID NO: | SEQ ID | SEQ ID |
| (PD-1) | | | E: 21-170, | | 10 | NO: 198 | NO: 37 |
| | | | T: 171-191, | | (21-288) | | |
| | | | C: 192-288 | | | | |
| ICOS | Q9Y6W8.1 | 30-132 IgV | S: 1-20, | B7RP1 | SEQ ID NO: | SEQ ID | SEQ ID |
| | | | E: 21-140, | | 11 | NO: 199 | NO: 38 |
| | | | T: 141-161, | | (21-199) | | |
| | | | C: 162-199 | | | | |
| BTLA | Q7Z6A9.3 | 31-132 IgV | S: 1-30, | HVEM | SEQ ID NO: | SEQ ID | SEQ ID |
| (CD272) | | | E: 31-157, | | 12 | NO: 200 | NO: 39 |
| | | | T: 158-178, | | (31-289) | | |
| | | | C: 179-289 | | | | |
| CD4 | P01730.1 | 26-125 IgV, | S: 1-25, | MHC class II | SEQ ID NO: | SEQ ID | SEQ ID |
| | | 126-203 IgC2, | E: 26-396, | | 13 | NO: 201 | NO: 40 |
| | | 204-317 IgC2, | T: 397-418, | | (26-458) | | |
| | | 317-389, 318- | C: 419-458 | | | | |
| | | 374 IgC2 | | | | | |
| CD8A | P01732.1 | 22-135 IgV | S: 1-21, | MHC class 1 | SEQ ID NO: | SEQ ID | SEQ ID |
| (CD8- | | | E: 22-182, | | 14 | NO: 202 | NO: 41 |
| alpha) | | | T: 183-203, | | (22-235) | | |
| | | | C: 204-235 | | | | |
| CD8B | P10966.1 | 22-132 IgV | S: 1-21, | MHC class 1 | SEQ ID NO: | SEQ ID | SEQ ID |
| (CD8-beta) | | | E: 22-170, | | 15 | NO: 203 | NO: 42 |
| | | | T: 171-191, | | (22-210) | | |
| | | | C: 192-210 | | | | |
| LAG3 | P18627.5 | 37-167 IgV, | S: 1-28, | MHC class 11 | SEQ ID NO: | SEQ ID | SEQ ID |
| | | 168-252 IgC2, | E: 29-450, | | 16 | NO: 204 | NO: 43 |
| | | 265-343 IgC2, | T: 451-471, | | (29-525) | | |
| | | 349-419 IgC2 | C: 472-525 | | | | |
| HAVCR2 | Q8TDQ0.3 | 22-124 IgV | S: 1-21, | CEACAM-1, | SEQ ID NO: | SEQ ID | SEQ ID |
| (TIM-3) | | | E: 22-202, | phosphati- | 17 | NO: 205 | NO: 44 |
| | | | T: 203-223, | dylserine, | (22-301) | | |
| | | | C: 224-301 | Galectin-9, | | | |
| | | | | HMGB1 | | | |
| CEACAM1 | P13688.2 | 35-142 IgV, | S: 1-34, | TIM-3 | SEQ ID NO: | SEQ ID | SEQ ID |
| | | 145-232 IgC2, | E: 35-428, | | 18 | NO: 206 | NO: 45 |
| | | 237-317 IgC2, | T: 429-452, | | (35-526) | | |
| | | 323-413 IgC2 | C: 453-526 | | | | |
| TIGIT | Q495A1.1 | 22-124 IgV | S: 1-21, | CD155, CD112 | SEQ ID NO: | SEQ ID | SEQ ID |
| | | | E: 22-141, | | 19 | NO: 207 | NO: 46 |
| | | | T: 142-162, | | (22-244) | | |
| | | | C: 163-244 | | | | |
| PVR | P15151.2 | 24-139 IgV, | S: 1-20, | TIGIT, CD226, | SEQ ID NO: | SEQ ID | SEQ ID |
| (CD155) | | 145-237 IgC2, | E: 21-343, | CD96, | 20 | NO: 208 | NO: 47 |
| | | 244-328 IgC2 | T: 344-367, | poliovirus | (21-417) | | |
| | | | C: 368-417 | | | | |
| PVRL2 | Q92692.1 | 32-156 IgV, | S: 1-31, | TIGIT, CD226, | SEQ ID NO: | SEQ ID | SEQ ID |
| (CD 112) | | 162-256 IgC2, | E: 32-360, | CD112R | 21 | NO: 209 | NO: 48 |
| | | 261-345 IgC2 | T: 361-381, | | (32-538) | | |
| | | | C: 382-538 | | | | |
| CD226 | Q15762.2 | 19-126 IgC2, | S: 1-18, | CD155, CD112 | SEQ ID NO: | SEQ ID | SEQ ID |
| | | 135-239 IgC2 | E: 19-254, | | 22 | NO: 210 | NO: 49 |
| | | | T: 255-275, | | (19-336) | | |
| | | | C: 276-336 | | | | |
| CD2 | P06729.2 | 25-128 IgV, | S: 1-24, | CD58 | SEQ ID NO: | SEQ ID | SEQ ID |
| | | 129-209 IgC2 | E: 25-209, | | 23 | NO: 211 | NO: 50 |
| | | | T: 210-235, | | (25-351) | | |
| | | | C: 236-351 | | | | |
| CD160 | O95971.1 | 27-122 IgV | N/A | HVEM, MHC | SEQ ID NO: | SEQ ID | SEQ ID |
| | | | | family of | 24 | NO: 212 | NO: 51 |
| | | | | proteins | (27-159) | | |
| CD200 | P41217.4 | 31-141 IgV, | S: 1-30, | CD200R | SEQ ID NO: | SEQ ID | SEQ ID |
| | | 142-232 IgC2 | E: 31-232, | | 25 | NO: 213 | NO: 52 |
| | | | T: 233-259, | | (31-278) | | |
| | | | C: 260-278 | | | | |
| CD200R1 | Q8TD46.2 | 53-139 IgV, | S: 1-28, | CD200 | SEQ ID NO: | SEQ ID | SEQ ID |
| (CD200R) | | 140-228 IgC2 | E: 29-243, | | 26 | NO: 214 | NO: 53 |
| | | | T: 244-264, | | (29-325) | | |
| | | | C: 265-325 | | | | |
| NCR3 | O14931.1 | 19-126 IgC- | S: 1-18, | B7-H6 | SEQ ID NO:27 | SEQ ID | SEQ ID |
| (NKp30) | | like | E: 19-135, | | (19-201) | NO: 215 | NO: 54 |
| | | | T: 136-156, | | | | |
| | | | C: 157-201 | | | | |
| VSIG8 | Q5VU13 | 22-141 IgVl, | S: 1-21 | VISTA | SEQ ID NO: | SEQ ID | SEQ ID |
| | | 146-257 | E: 22-263 | | 216 | NO: 217 | NO: 218 |
| | | IgV2 | T: 264-284 | | (22-414) | | |
| | | | C: 285-414 | | | | |

[0240] In some embodiments, the provided immunomodulatory proteins, in addition to containing a variant PD-L1 polypeptide, also contains at least 1, 2, 3, 4, 5 or 6 additional immunoglobulin superfamily (IgSF) domains, such as an IgD domain of an IgSF family member set forth in Table 2. In some embodiments, the provided immunomodulatory protein contains at least one additional IgSF domain (e.g. second IgSF domain). In some embodiments, the provided immunomodulatory protein contains at least two additional IgSF domains (e.g. second and third IgSF domain). In some embodiments, the provided immunomodulatory protein contains at least three additional IgSF domains (e.g. second, third and fourth). In some embodiments, the provided immunomodulatory protein contains at least four additional IgSF domains (e.g. second, third, fourth and fifth). In some embodiments, the provided immunomodulatory protein contains at least five additional IgSF domains (e.g. second, third, fourth, fifth and sixth). In some embodiments, the provided immunomodulatory protein contains at least six additional IgSF domains (e.g. second, third, fourth, fifth, sixth and seventh). In some embodiments, each of the IgSF domains in the immunomodulatory protein are different. In some embodiments, at least one of the additional IgSF domain is the same as at least one other IgSF domain in the immunomodulatory protein. In some embodiments, each of the IgSF domains is from or derived from a different IgSF family member. In some embodiments, at least two of the IgSF domains is from or derived from the same IgSF family member.

[0241] In some embodiments, the additional IgSF domain comprises an IgV domain or an IgC (e.g., IgC2) domain or domains, or a specific binding fragment of the IgV domain or a specific binding fragment of the IgC (e.g., IgC2) domain or domains. In some embodiments, the additional IgSF domain is or comprises a full-length IgV domain. In some embodiments, the additional IgSF domain is or comprises a full-length IgC (e.g., IgC2) domain or domains. In some embodiments, the additional IgSF domain is or comprises a specific binding fragment of the IgV domain. In some embodiments, the additional IgSF domain is or comprises a specific binding fragment of the IgC (e.g., IgC2) domain or domains. In some embodiments, the immunomodulatory protein contains at least two additional IgSF domains from a single (same) IgSF member. For example, in some aspects, the immunomodulatory protein contains an ECD or portion thereof of an IgSF member containing a full-length IgV domain and a full-length IgC (e.g., IgC2) domain or domains or specific binding fragments thereof.

[0242] In some embodiments, the provided immunomodulatory proteins contains at least one additional IgSF domain (e.g. a second or, in some cases, also a third IgSF domain and so on) in which at least one additional, e.g. a second or third IgSF domain, is an IgSF domain set forth in a wild-type or unmodified IgSF domain or a specific binding fragment thereof contained in the sequence of amino acids set forth in any of SEQ ID NOS: 1-27 and 216. In some embodiments, the wild-type or unmodified IgSF domain is an IgV domain or an IgC domain, such as an IgC1 or IgC2 domain.

[0243] In some embodiments, the provided immunomodulatory proteins, in addition to containing a variant PD-L1 polypeptide, also contains at least one additional affinity-modified IgSF domain (e.g. a second or, in some cases, also a third affinity-modified IgSF domain and so on) in which at least one additional IgSF domain is a vIgD that contains one or more amino acid modifications (e.g. substitution, deletion or mutation) compared to an IgSF domain in a wild-type or unmodified IgSF domain, such as an IgSF domain in an IgSF family member set forth in Table 2. In some embodiments, the additional, e.g., second or third, affinity-modified IgSF domain comprises at least 85%, 86%, 87%, 88%, 89%, 90%, 91%, 92%, 93%, 94%, 95%, 96%, 97%, 98%, 99% or more sequence identity to a wild-type or unmodified IgSF domain or a specific binding fragment thereof contained in the sequence of amino acids set forth in any of SEQ ID NOS: 1-27 and 216. In some embodiments, the wild-type or unmodified IgSF domain is an IgV domain or an IgC domain, such as an IgC1 or IgC2 domain. In some embodiments, the additional, e.g., or second or third, IgSF domain is an affinity-modified IgV domain and/or IgC domain. In some embodiments, the one or more additional IgSF domain is an affinity-modified IgSF domain that contains an IgV domain and/or an IgC (e.g., IgC2) domain or domains, or a specific binding fragment of the IgV domain and/or a specific binding fragment of the IgC (e.g., IgC2) domain or domains, in which the IgV and/or IgC domain contains the amino acid modification(s) (e.g., substitution(s)). In some embodiments, the one or more additional affinity-modified IgSF domain contains an IgV domain containing the amino acid modification(s) (e.g. substitution(s)). In some embodiments, the one or more additional affinity-modified IgSF domain include IgSF domains present in the ECD or a portion of the ECD of the corresponding unmodified IgSF family member, such as a full-length IgV domain and a full-length IgC (e.g., IgC2) domain or domains, or specific binding fragments thereof, in which one or both of the IgV and IgC contain the amino acid modification(s) (e.g. substitution(s)).

[0244] In some embodiments, the immunomodulatory polypeptide comprising a variant PD-L1 can include one or more vIgD of PD-L1 provided herein. In some embodiments, a variant PD-L1 immunomodulatory protein provided herein will comprise exactly 1, 2, 3, 4, 5 or more variant PD-L1 sequences. In some embodiments, at least two of variant PD-L1 sequences are identical variant IgSF domains.

[0245] In some embodiments, the provided immunomodulatory polypeptide comprises two or more vIgD sequences of PD-L1. Multiple variant PD-L1 within the polypeptide chain can be identical (i.e., the same species) to each other or be non-identical (i.e., different species) variant PD-L1 sequences. In addition to single polypeptide chain embodiments, in some embodiments two, three, four, or more of the polypeptides of the invention can be covalently or non-covalently attached to each other. Thus, monomeric, dimeric, and higher order (e.g., 3, 4, 5, or more) multimeric proteins are provided herein. For example, in some embodiments exactly two polypeptides of the invention can be covalently or non-covalently attached to each other to form a dimer. In some embodiments, attachment is made via interchain cysteine disulfide bonds. Compositions comprising two or more polypeptides of the invention can be of an identical species or substantially identical species of polypeptide (e.g., a homodimer) or of non-identical species of polypeptides (e.g., a heterodimer). A composition having a plurality of linked polypeptides of the invention can, as noted above, have one or more identical or non-identical variant PD-L1 of the invention in each polypeptide chain. In some specific embodiments, identical or substantially identical species (allowing for 3 or fewer N-terminus or C-terminus amino acid sequence differences) of PD-L1-Fc variant fusion polypeptides will be dimerized to create a homodimer. Alternatively, different species of PD-L1-Fc variant fusion polypeptides can be dimerized to yield a heterodimer.

[0246] In some embodiments, the provided immunomodulatory protein contains at least one additional (e.g. or second or, in some cases, also a third IgSF domain and so on) IgSF domain that is a vIgD that contains one or more amino acid substitutions compared to an IgSF domain (e.g. IgV) of a wild-type or unmodified IgSF domain other than PD-L1.

[0247] In some embodiments, the one or more additional IgSF domain (e.g. second or third IgSF) domain is an IgSF domain (e.g. ECD or IgV) of another IgSF family member that itself also binds to an inhibitory receptor. In some aspects, the one or more additional IgSF domain (e.g. second or third IgSF) domain is an affinity-modified IgSF domain that is a variant IgSF domain (vIgD) of an IgSF family member that bind to an inhibitory receptor and that contains one or more amino acid substitutions in an IgSF domain (e.g. ECD or IgV), in which, in some cases, the one or more amino acid modifications result in increased binding to the inhibitory receptor. In some embodiments, the vIgD contains one or more amino acid modifications (e.g. substitutions, deletions or additions) in a wild-type or unmodified IgSF domain (e.g. ECD or IgV) of an IgSF family member that binds to an inhibitory receptor. In addition to PD-1, exemplary of such inhibitory receptors are CTLA-4, LAG3, TIGIT, TIM-3, or BTLA. In some embodiments, the one or more additional IgSF domain is from an IgSF family member selected from CD155, CD112, PD-L2, CD80 or CEACAM1. Thus, in some aspects, provided are multi-target checkpoint antagonists that target or block activity of more than one inhibitory receptor.

[0248] In some embodiments, the immunomodulatory protein in a multi-target checkpoint antagonist that targets or blocks activity of at least two, three, four or more inhibitory receptors. In some embodiments, there is provided an immunomodulatory protein containing any one of the variant PD-L1 polypeptides and one or more IgSF domain of an inhibitory receptor, such as a wild-type or unmodified inhibitory receptor. In some embodiments, there is provided an immunomodulatory protein containing any one of the variant PD-L1 polypeptides and one or more IgSF domain of CD80, e.g. wild-type or unmodified CD80, such as an IgV domain set forth in SEQ ID NO:1005, 1079 or 2030 or an ECD or a portion thereof (containing the IgV and IgC domain or specific binding fragments thereof) set forth in SEQ ID NO:28 or a portion thereof. In some embodiments, there is provided an immunomodulatory protein containing any one of the variant PD-L1 polypeptides and one or more IgSF domain of CD112, e.g. wild-type or unmodified CD112, such as an IgV domain set forth in SEQ ID NO:666 or 761 or an ECD or a portion thereof (containing the IgV and IgC domain or specific binding fragments thereof) set forth in SEQ ID NO:48 or a portion thereof. In some embodiments, there is provided an immunomodulatory protein containing any one of the variant PD-L1 polypeptides and one or more IgSF domain of PD-L2, e.g. wild-type or unmodified PD-L2, such as an IgV domain set forth in SEQ ID NO:1203 or 1263 or an ECD or a portion thereof (containing the IgV and IgC domain or specific binding fragments thereof) set forth in SEQ ID NO:31 or a portion thereof. In some embodiments, there is provided an an immunomodulatory protein containing any one of the variant PD-L1 polypeptides and one or more IgSF domain of CD155, e.g. wild-type or unmodified CD155, such as an IgV domain set forth in SEQ ID NO 310 or 353 or an ECD or a portion thereof (containing the IgV and IgC domain or specific binding fragments thereof) set forth in SEQ ID NO:47 or a portion thereof.

[0249] In some embodiments, there is provided an immunomodulatory protein containing one or more additional IgSF domain (e.g., second or third IgSF) that is a vIgD of an IgSF family member that binds to an inhibitory receptor in which the one or more amino acid modifications in an IgSF domain (e.g. IgV) results in increased binding affinity of the vIgD, or a fusion or immunomodulatory protein containing the vIgD, for its inhibitory receptor cognate binding partner compared to the unmodified IgSF domain, such as binding affinity that is increased more than 1.2-fold, 1.5-fold, 2-fold, 3-fold, 4-fold, 5-fold, 6-fold, 7-fold, 8-fold, 9-fold, 10-fold, 20-fold, 30-fold 40-fold or 50-fold. In some embodiments, the one or more amino acid modifications in an IgSF domain (e.g. IgV) results in increased selectivity of the vIgD, or a fusion or immunomodulatory protein containing the vIgD for its inhibitory receptor compared to the unmodified IgSF domain. In some embodiments, the increased selectivity is a greater ratio of binding of the vIgD for the inhibitory receptor versus another cognate binding partner, such as a cognate binding partner that is not an inhibitory receptor, compared to the ratio of binding of the unmodified IgSF for the inhibitory receptor versus the another cognate binding partner. In some embodiments, the ratio is greater by at least or at least about 1.2-fold, 1.5-fold, 2-fold, 3-fold, 4-fold, 5-fold, 6-fold, 7-fold, 8-fold, 9-fold, 10-fold, 20-fold, 30-fold 40-fold or 50-fold.

[0250] In some embodiments, the at least one additional (e.g. second or third) vIgD is an IgSF domain (e.g. IgV) of a variant CD80 polypeptide that contains one or more amino acid modifications (e.g. substitutions, deletions or additions) in the IgSF domain (e.g. IgV) of CD155 or CD112, which are IgSF family members that bind to the inhibitory receptor TIGIT. In some embodiments, the at least one additional (e.g. second) vIgD contains one or more amino acid modifications (e.g. substitutions, deletions or additions) in an IgSF domain (e.g. IgV) of CD80, which is an IgSF family member that bind to the inhibitory receptor CTLA-4. Exemplary amino acid modifications, such as substitutions, deletions or additions, in an IgSF domain (e.g. ECD or IgV containing IgV and IgC) of a variant CD80 polypeptide are set forth in Table 3. In some embodiments, there is provided an immunomodulatory protein containing any of the provided variant PD-L1 polypeptides and a variant CD80 polypeptide containing an IgV domain including any of the amino acid modifications set forth in Table 3, such as the IgV domain set forth in any of SEQ ID NOS:1006-1078, 1080-1112, 1114-1152 or an IgV domain that has at least 85%, 86%, 87%, 88%, 89%, 90%, 91%, 92%, 93%, 94%, 95%, 96%, 97%, 98%, 99% to any of SEQ ID NOS: 1006-1078, 1080-1112, 1114-1152 and contains the one or more amino acid modifications. In some embodiments, there is provided an immunomodulatory protein containing any of the provided variant PD-L1 polypeptides and a variant CD80 polypeptide containing an ECD or a portion thereof containing the IgV and/or IgC domains, in which is contained any of the amino acid modifications set forth in Table 3, such as the ECD set forth in any of SEQ ID NOS: 932-964, 966-1004 or an ECD that contains at least 85%, 86%, 87%, 88%, 89%, 90%, 91%, 92%, 93%, 94%, 95%, 96%, 97%, 98%, 99% to any of SEQ ID NOS: 932-964, 966-1004 and contains the one or more amino acid modifications.

[0251] In some embodiments, the at least one additional (e.g., second or third) vIgD is an IgSF domain (e.g. IgV) of a variant CD155 polypeptide that contains one or more amino acid modifications (e.g., substitutions, deletions or additions) in the IgSF domain (e.g., IgV) compared to unmodified or wild-type CD155, which, in some aspects, result in increased binding to the inhibitory receptor TIGIT. Exemplary amino acid modifications, such as substitutions, deletions or additions, in an IgSF domain (e.g. IgV or ECD containing IgV and IgC) of a variant CD155 polypeptide are set forth in Table 5. In some embodiments, there is provided an immunomodulatory protein containing any of the provided variant PD-L1 polypeptides and a variant CD155 polypeptide containing an IgV domain including any of the amino acid modifications set forth in Table 5, such as the IgV domain set forth in any of SEQ ID NOS: 332-352, 354-374, 472-665, 1505-1550, 1570-1714, or an IgV domain that has at least 85%, 86%, 87%, 88%, 89%, 90%, 91%, 92%, 93%, 94%, 95%, 96%, 97%, 98%, 99% to any of SEQ ID NOS: 332-352, 354-374, 472-665, 1505-1550, 1570-1714 and contains the one more amino acid modifications. In some embodiments, there is provided an immunomodulatory protein containing any of the provided variant PD-L1 polypeptides and a variant CD155 polypeptide containing an ECD or a portion thereof containing the IgV and/or IgC domains, in which is contained any of the amino acid modifications set forth in Table 5, such as the ECD set forth in any of SEQ ID NOS: 311-331, 375-471, 1551-1622 or an ECD that contains at least 85%, 86%, 87%, 88%, 89%, 90%, 91%, 92%, 93%, 94%, 95%, 96%, 97%, 98%, 99% to any of SEQ ID NOS: 311-331, 375-471, 1551-1622 and contains the one or more amino acid modifications.

[0252] In some embodiments, the at least one additional (e.g., second or third) vIgD is an IgSF domain (e.g. IgV) of a variant CD112 polypeptide that contains one or more amino acid modifications (e.g., substitutions, deletions or additions) in the IgSF domain (e.g., IgV) compared to unmodified or wild-type CD112, which, in some aspects, result in increased binding to the inhibitory receptor TIGIT. Exemplary amino acid modifications, such as substitutions, deletions or additions, in an IgSF domain (e.g. IgV or ECD containing IgV and IgC) of a variant CD112 polypeptide are set forth in Table 4. In some embodiments, there is provided an immunomodulatory protein containing any of the provided variant PD-L1 polypeptides and a variant CD112 polypeptide containing an IgV domain including any of the amino acid modifications set forth in Table 4, such as the IgV domain set forth in any of SEQ ID NOS: 714-760, 762-808, 850-931, or an IgV domain that has at least 85%, 86%, 87%, 88%, 89%, 90%, 91%, 92%, 93%, 94%, 95%, 96%, 97%, 98%, 99% to any of SEQ ID NOS: 714-760, 762-808, 850-931 and contains the one more amino acid modifications. In some embodiments, there is provided an immunomodulatory protein containing any of the provided variant PD-L1 polypeptides and a variant CD112 polypeptide containing an ECD or a portion thereof containing the IgV and/or IgC domains, in which is contained any of the amino acid modifications set forth in Table 4, such as the ECD set forth in any of SEQ ID NOS: 667-713, 809-849, 1433-1456 or an ECD that contains at least 85%, 86%, 87%, 88%, 89%, 90%, 91%, 92%, 93%, 94%, 95%, 96%, 97%, 98%, 99% to any of SEQ ID NOS: 667-713, 809-849, 1433-1456 and contains the one or more amino acid modifications.

[0253] In some embodiments, the at least one additional (e.g., second or third) vIgD is an IgSF domain (e.g. IgV) of a variant PD-L2 polypeptide that contains one or more amino acid modifications (e.g., substitutions, deletions or additions) in the IgSF domain (e.g., ECD or IgV) compared to unmodified or wild-type PD-L2, which, in some aspects, result in increased binding to the inhibitory receptor PD-1. Exemplary amino acid modifications, such as substitutions, deletions or additions, in an IgSF domain (e.g. IgV or ECD containing IgV and IgC) of a variant PD-L2 polypeptide are set forth in Table 8. In some embodiments, there is provided an immunomodulatory protein containing any of the provided variant PD-L1 polypeptides and a variant PD-L2 polypeptide containing an IgV domain including any of the amino acid modifications set forth in Table 8, such as the IgV domain set forth in any of SEQ ID NOS: 1281-1331, 1333-1407, 1409-1432 or an IgV domain that has at least 85%, 86%, 87%, 88%, 89%, 90%, 91%, 92%, 93%, 94%, 95%, 96%, 97%, 98%, 99% to any of SEQ ID NOS: 1281-1331, 1333-1407, 1409-1432 and contains the one more more amino acid modifications. In some embodiments, there is provided an immunomodulatory protein containing any of the provided variant PD-L1 polypeptides and a variant PD-L2 polypeptide containing an ECD or a portion thereof containing the IgV and/or IgC domains, in which is contained any of the amino acid modifications set forth in Table 8, such as the ECD set forth in any of SEQ ID NOS:1204-1254, 1256-1280 or an ECD that contains at least 85%, 86%, 87%, 88%, 89%, 90%, 91%, 92%, 93%, 94%, 95%, 96%, 97%, 98%, 99% to any of SEQ ID NOS: 1204-1254, 1256-1280 and contains the one or more amino acid modifications.

[0254] In some embodiments, the one or more additional IgSF domain (e.g. second IgSF) domain is an IgSF domain (e.g. IgV) of another IgSF family member that binds or recognizes a tumor antigen. In such embodiments, the IgSF family member serves as a tumor-localizing moiety, thereby bringing the vIgD of PD-L1 in close proximity to immune cells in the tumor microenvironment. In some embodiments, the additional IgSF domain (e.g. second IgSF) domain is an IgSF domain of NKp30, which binds or recognizes B7-H6 expressed on a tumor cell. In some embodiments, the at least one additional (e.g. second) IgSF domain, e.g. NKp30, is an affinity-modified IgSF domain or vIgD that contains one or more amino acid modifications (e.g. substitutions, deletions or additions). In some embodiments, the one or more amino acid modifications increase binding affinity and/or selectivity to B7-H6 compared to unmodified IgSF domain, e.g. NKp30, such as by at least or at least about 1.2-fold, 1.5-fold, 2-fold, 3-fold, 4-fold, 5-fold, 6-fold, 7-fold, 8-fold, 9-fold, 10-fold, 20-fold, 30-fold 40-fold or 50-fold. Exemplary amino acid modifications, such as substitutions, deletions or additions, in an IgSF domain (e.g. IgC-like or full ECD) of a variant NKp30 polypeptide are set forth in Table 6. Among the exemplary polypeptides is an NKp30 variant that contains the mutations L30V/A60V/S64P/S86G with reference to positions in the NKp30 extracellular domain corresponding to positions set forth in SEQ ID NO: 54. In some embodiments, there is provided an immunomodulatory protein containing any of the provided variant PD-L1 polypeptides and a variant NKp30 polypeptide containing an IgC-like domain including any of the amino acid modifications set forth in Table 6, such as the IgC-like domain set forth in any of SEQ ID NOS: 1184-1188 or an IgC-like domain that has at least 85%, 86%, 87%, 88%, 89%, 90%, 91%, 92%, 93%, 94%, 95%, 96%, 97%, 98%, 99% to any of SEQ ID NOS: 1184-1188 and contains the one more amino acid modifications. In some embodiments, there is provided an immunomodulatory protein containing any of the provided variant PD-L1 polypeptides and a variant NKp30 polypeptide containing an ECD or a portion thereof containing an IgSF domain or domains, in which is contained any of the amino acid modifications set forth in Table 6, such as the ECD set forth in any of SEQ ID NOS: 1178-1182 or an ECD that contains at least 85%, 86%, 87%, 88%, 89%, 90%, 91%, 92%, 93%, 94%, 95%, 96%, 97%, 98%, 99% to any of SEQ ID NOS: 1178-1182 and contains the one or more amino acid modifications.

[0255] In some embodiments, the at least one additional (e.g., second or third) vIgD is an IgSF domain (e.g. IgV) of a variant CD86 polypeptide that contains one or more amino acid modifications (e.g., substitutions, deletions or additions) in the IgSF domain (e.g., IgV) compared to unmodified or wild-type CD86, which, in some aspects, result in increased binding to its cognate binding partner. Exemplary amino acid modifications, such as subtitutions, deletions or additions, in an IgSF domain (e.g. IgV or ECD containing IgV and IgC) of a variant CD86 polypeptide are set forth in Table 7. Among exemplary polypeptides include CD86 variants that contain the mutations Q35H/H90L/Q102H with reference to positions in the CD86 extracellular domain corresponding to positions set forth in SEQ ID NO: 29. In some embodiments, there is provided an immunomodulatory protein containing any of the provided variant PD-L1 polypeptides and a variant CD86 polypeptide containing an IgV domain including any of the amino acid modifications set forth in Table 7, such as the IgV domain set forth in any of SEQ ID NOS: 1196-1199 or an IgV domain that has at least 85%, 86%, 87%, 88%, 89%, 90%, 91%, 92%, 93%, 94%, 95%, 96%, 97%, 98%, 99% to any of SEQ ID NOS: 1196-1199 and contains the one more amino acid modifications. In some embodiments, there is provided an immunomodulatory protein containing any of the provided variant PD-L1 polypeptides and a variant CD86 polypeptide containing an ECD or a portion thereof containing the IgV and/or IgC domains, in which is contained any of the amino acid modifications set forth in Table 7, such as the ECD set forth in any of SEQ ID NOS: 1191-1194 or an ECD that contains at least 85%, 86%, 87%, 88%, 89%, 90%, 91%, 92%, 93%, 94%, 95%, 96%, 97%, 98%, 99% to any of SEQ ID NOS:1191-1194 and contains the one or more amino acid modifications.

[0256] Tables 3-8 provide exemplary polypeptides containing one or more affinity-modified IgSF domains that can be used in stack constructs provided herein.

TABLE 3
Exemplary variant CD80 polypeptides

| | ECD | |
|---|---|---|
| | SEQ ID | IgV SEQ |
| Mutation(s) | NO | ID NO |
| Wild-type | 28 | 1005, 2030 |
| L70P | 932 | 1006, 1080 |
| I30F/L70P | 933 | 1007, 1081 |
| Q27H/T41S/A71D | 934 | 1008, 1082 |
| I30T/L70R | 935 | 1009, 1083 |
| T13R/C16R/L70Q/A71D | 936 | 1010, 1084 |
| T57I | 937 | 1011, 1085 |
| M43I/C82R | 938 | 1012, 1086 |
| V22L/M38V/M47T/A71D/L85M | 939 | 1013, 1087 |
| I30V/T57I/L70P/A71D/A91T | 940 | 1014, 1088 |
| V22I/L70M/A71D | 941 | 1015, 1089 |
| N55D/L70P/E77G | 942 | 1016, 1090 |
| T57A/I69T | 943 | 1017, 1091 |
| N55D/K86M | 944 | 1018, 1092 |
| L72P/T79I | 945 | 1019, 1093 |
| L70P/F92S | 946 | 1020, 1094 |
| T79P | 947 | 1021, 1095 |
| E35D/M47I/L65P/D90N | 948 | 1022, 1096 |
| L25S/E35D/M47I/D90N | 949 | 1023, 1097 |
| A71D | 951 | 1025, 1099 |
| E81K/A91S | 953 | 1027, 1101 |
| A12V/M47V/L70M | 954 | 1028, 1102 |
| K34E/T41A/L72V | 955 | 1029, 1103 |
| T41S/A71D/V84A | 956 | 1030, 1104 |
| E35D/A71D | 957 | 1031, 1105 |
| E35D/M47I | 958 | 1032, 1106 |
| K36R/G78A | 959 | 1033, 1107 |
| Q33E/T41A | 960 | 1034, 1108 |
| M47V/N48H | 961 | 1035, 1109 |
| M47L/V68A | 962 | 1036, 1110 |
| S44P/A71D | 963 | 1037, 1111 |
| Q27H/M43I/A71D/R73S | 964 | 1038, 1112 |
| E35D/T57I/L70Q/A71D | 966 | 1040, 1114 |
| M47I/E88D | 967 | 1041, 1115 |
| M42I/I61V/A71D | 968 | 1042, 1116 |
| P51A/A71D | 969 | 1043, 1117 |
| H18Y/M47I/T57I/A71G | 970 | 1044, 1118 |
| V20I/M47V/T57I/V84I | 971 | 1045, 1119 |
| V20I/M47V/A71D | 972 | 1046, 1120 |
| A71D/L72V/E95K | 973 | 1047, 1121 |
| V22L/E35G/A71D/L72P | 974 | 1048, 1122 |
| E35D/A71D | 975 | 1049, 1123 |
| E35D/I67L/A71D | 976 | 1050, 1124 |
| Q27H/E35G/A71D/L72P/T79I | 977 | 1051, 1125 |
| T13R/M42V/M47I/A71D | 978 | 1052, 1126 |
| E35D | 979 | 1053, 1127 |
| E35D/M47I/L70M | 980 | 1054, 1128 |
| E35D/A71D/L72V | 981 | 1055, 1129 |
| E35D/M43L/L70M | 982 | 1056, 1130 |
| A26P/E35D/M43I/L85Q/E88D | 983 | 1057, 1131 |
| E35D/D46V/L85Q | 984 | 1058, 1132 |
| Q27L/E35D/M47I/T57I/L70Q/E88D | 985 | 1059, 1133 |
| M47V/I69F/A71D/V83I | 986 | 1060, 1134 |
| E35D/T57A/A71D/L85Q | 987 | 1061, 1135 |
| H18Y/A26T/E35D/A71D/L85Q | 988 | 1062, 1136 |
| E35D/M47L | 989 | 1063, 1137 |
| E23D/M42V/M43I/I58V/L70R | 990 | 1064, 1138 |
| V68M/L70M/A71D/E95K | 991 | 1065, 1139 |
| N55I/T57I/I69F | 992 | 1066, 1140 |
| E35D/M43I/A71D | 993 | 1067, 1141 |
| T41S/T57I/L70R | 994 | 1068, 1142 |
| H18Y/A71D/L72P/E88V | 995 | 1069, 1143 |
| V20I/A71D | 996 | 1070, 1144 |
| E23G/A26S/E35D/T62N/A71D/L72V/L85M | 997 | 1071, 1145 |
| A12T/E24D/E35D/D46V/I61V/L72P/E95V | 998 | 1072, 1146 |
| V22L/E35D/M43L/A71G/D76H | 999 | 1073, 1147 |
| E35G/K54E/A71D/L72P | 1000 | 1074, 1148 |
| L70Q/A71D | 1001 | 1075, 1149 |
| A26E/E35D/M47L/L85Q | 1002 | 1076, 1150 |
| D46E/A71D | 1003 | 1077, 1151 |
| Y31H/E35D/T41S/V68L/K93R/R94W | 1004 | 1078, 1152 |

TABLE 4
Exemplary variant CD112 polypeptides

| | ECD | |
|---|---|---|
| | SEQ | |
| | ID | IgV SEQ ID |
| Mutation(s) | NO | NO |
| Wild-type | 48 | 666, 761 |
| Y33H, A112V, G117D | 667 | 714, 762 |
| V19A, Y33H, S64G, S80G, G98S, N106Y, A112V | 668 | 715, 763 |
| L32P, A112V | 669 | 716, 764 |
| A95V, A112I | 670 | 717, 765 |
| P28S, A112V | 671 | 718, 766 |
| P27A, T38N, V101A, A112V | 672 | 719, 767 |
| S118F | 673 | 720, 768 |
| R12W, H48Y, F54S, S118F | 674 | 721, 769 |
| R12W, Q79R, S118F | 675 | 722, 770 |
| T113S, S118Y | 676 | 723, 771 |
| S118Y | 677 | 724, 772 |
| N106I, S118Y | 678 | 725, 773 |
| N106I, S118F | 679 | 726, 774 |
| A95T, L96P, S118Y | 680 | 727, 775 |
| Y33H, P67S, N106Y, A112V | 681 | 728, 776 |
| N106Y, A112V | 682 | 729, 777 |
| T18S, Y33H, A112V | 683 | 730, 778 |
| P9S, Y33H, N47S, A112V | 684 | 731, 779 |
| P42S, P67H, A112V | 685 | 732, 780 |
| P27L, L32P, P42S, A112V | 686 | 733, 781 |
| G98D, A112V | 687 | 734, 782 |
| Y33H, S35P, N106Y, A112V | 688 | 735, 783 |
| L32P, P42S, T100A, A112V | 689 | 736, 784 |
| P27S, P45S, N106I, A112V | 690 | 737, 785 |
| Y33H, N47K, A112V | 691 | 738, 786 |
| Y33H, N106Y, A112V | 692 | 739, 787 |
| K78R, D84G, A112V, F114S | 693 | 740, 788 |
| Y33H, N47K, F54L, A112V | 694 | 741, 789 |
| Y33H, A112V | 695 | 742, 790 |
| A95V, A112V | 696 | 743, 791 |
| R12W, A112V | 697 | 744, 792 |
| R12W, P27S, A112V | 698 | 745, 793 |
| Y33H, V51M, A112V | 699 | 746, 794 |
| Y33H, A112V, S118T | 700 | 747, 795 |
| Y33H, V101A, A112V, P115S | 701 | 748, 796 |
| H24R, T38N, D43G, A112V | 702 | 749, 797 |
| A112V | 703 | 750, 798 |
| P27A, A112V | 704 | 751, 799 |
| A112V, S118T | 705 | 752, 800 |
| R12W, A112V, M122I | 706 | 753, 801 |
| Q83K, N106Y, A112V | 707 | 754, 802 |
| R12W, P27S, A112V, S118T | 708 | 755, 803 |
| P28S, Y33H, A112V | 709 | 756, 804 |
| P27S, Q90R, A112V | 710 | 757, 805 |
| L15V, P27A, A112V, S118T | 711 | 758, 806 |
| Y33H, N106Y, T108I, A112V | 712 | 759, 807 |
| Y33H, P56L, V75M, V101M, A112V | 713 | 760, 808 |
| N47K, Q79R, S118F | 809 | 850, 891 |
| Q40R, P60T, A112V, S118T | 810 | 851, 892 |
| F114Y, S118F | 811 | 852, 893 |
| Y33H, K78R, S118Y | 812 | 853, 894 |
| R12W, A46T, K66M, Q79R, N106I, T113A, S118F | 813 | 854, 895 |
| Y33H, A112V, S118F | 814 | 855, 896 |
| R12W, Y33H, N106I, S118F | 815 | 856, 897 |
| L15V, Q90R, S118F | 816 | 857, 898 |
| N47K, D84G, N106I, S118Y | 817 | 858, 899 |
| L32P, S118F | 818 | 859, 900 |
| Y33H, Q79R, A112V, S118Y | 819 | 860, 901 |
| T18A, N106I, S118T | 820 | 861, 902 |
| L15V, Y33H, N106Y, A112V, S118F | 821 | 862, 903 |
| V37M, S118F | 822 | 863, 904 |
| N47K, A112V, S118Y | 823 | 864, 905 |
| A46T, A112V | 824 | 865, 906 |
| P28S, Y33H, N106I, S118Y | 825 | 866, 907 |
| P30S, Y33H, N47K, V75M, Q79R, N106I, S118Y | 826 | 867, 908 |
| V19A, N47K, N106Y, K116E, S118Y | 827 | 868, 909 |
| Q79R, T85A, A112V, S118Y | 828 | 869, 910 |
| V101M, N106I, S118Y | 829 | 870, 911 |
| Y33H, Q79R, N106I, A112V, S118T | 830 | 871, 912 |
| Q79R, A112V | 831 | 872, 913 |
| Y33H, A46T, Q79R, N106I, S118F | 832 | 873, 914 |
| A112V, G121S | 833 | 874, 915 |
| Y33H, Q79R, N106I, S118Y | 834 | 875, 916 |
| Y33H, N106I, A112V | 835 | 876, 917 |
| Y33H, A46T, V101M, A112V, S118T | 836 | 877, 918 |
| L32P, L99M, N106I, S118F | 837 | 878, 919 |
| L32P, T108A, S118F | 838 | 879, 920 |
| R12W, Q79R, A112V | 839 | 880, 921 |
| Y33H, N106Y, E110G, A112V | 840 | 881, 922 |
| Y33H, N106I, S118Y | 841 | 882, 923 |
| Q79R, S118F | 842 | 883, 924 |
| Y33H, Q79R, G98D, V101M, A112V | 843 | 884, 925 |
| N47K, T81S, V101M, A112V, S118F | 844 | 885, 926 |
| G82S, S118Y | 845 | 886, 927 |
| Y33H, A112V, S118Y | 846 | 887, 928 |
| Y33H, N47K, Q79R, N106Y, A112V | 847 | 888, 929 |
| Y33H, S118T | 848 | 889, 930 |
| R12W, Y33H, Q79R, V101M, A112V | 849 | 890, 931 |
| Y33H, Q83K, A112V, S118T | 1433 | 1457, 1481 |
| V29M, Y33H, N106I, S118F | 1434 | 1458, 1482 |
| Y33H, A46T, A112V | 1435 | 1459, 1483 |
| Y33H, Q79R, S118F | 1436 | 1460, 1484 |
| Y33H, N47K, F74L, S118F | 1437 | 1461, 1485 |
| R12W, V101M, N106I, S118Y | 1438 | 1462, 1486 |
| A46T, V101A, N106I, S118Y | 1439 | 1463, 1487 |
| N106Y, A112V, S118T | 1440 | 1464, 1488 |
| S76P, T81I, V101M, N106Y, A112V, S118F | 1441 | 1465, 1489 |
| P9R, L21V, P22L, I34M, S69F, F74L, A87V, A112V, | 1442 | 1466, 1490 |
| L125A | | |
| Y33H, V101M, A112V | 1443 | 1467, 1491 |
| V29A, L32P, S118F | 1444 | 1468, 1492 |
| Y33H, V101M, N106I, A112V | 1445 | 1469, 1493 |
| R12W, Y33H, N47K, Q79R, S118Y | 1446 | 1470, 1494 |
| Y33H, A46T, A112V, S118T | 1447 | 1471, 1495 |
| Y33H, A112V, F114L, S118T | 1448 | 1472, 1496 |
| Y33H, T38A, A46T, V101M, A112V | 1449 | 1473, 1497 |
| P28S, Y33H, S69P, N106I, A112V, S118Y | 1450 | 1474, 1498 |
| Y33H, P42L, N47K, V101M, A112V | 1451 | 1475, 1499 |
| Y33H, N47K, F74S, Q83K, N106I, F111L, A112V, | 1452 | 1476, 1500 |
| S118T | | |
| Y33H, A112V, S118T, V119A | 1453 | 1477, 1501 |
| Y33H, N106I, A112V, S118F | 1454 | 1478, 1502 |
| Y33H, K66M, S118F, W124L | 1455 | 1479, 1503 |
| N106I, A112V | 1456 | 1480, 1504 |

TABLE 5
Exemplary variant CD155 polypeptides

| | ECD | |
|---|---|---|
| | SEQ | |
| | ID | IgV SEQ |
| Mutation(s) | NO | ID NO |
| Wild-type | 47 | 310, 353 |
| P18S, P64S, F91S | 311 | 332, 354 |
| P18S, F91S, L104P | 312 | 333, 355 |
| L44P | 313 | 334, 356 |
| A56V | 314 | 335, 357 |
| P18L, L79V, F91S | 315 | 336, 358 |
| P18S, F91S | 316 | 337, 359 |
| P18T, F91S | 317 | 338, 360 |
| P18T, S42P, F91S | 318 | 339, 361 |
| G7E, P18T, Y30C, F91S | 319 | 340, 362 |
| P18T, F91S, G111D | 320 | 341, 363 |
| P18S, F91P | 321 | 342, 364 |
| P18T, F91S, F108L | 322 | 343, 365 |
| P18T, T45A, F91S | 323 | 344, 366 |
| P18T, F91S, R94H | 324 | 345, 367 |
| P18S, Y30C, F91S | 325 | 346, 368 |
| A81V, L83P | 326 | 347, 369 |
| L88P | 327 | 348, 370 |
| R94H | 328 | 349, 371 |
| A13E, P18S, A56V, F91S | 329 | 350, 372 |
| P18T, F91S, V115A | 330 | 351, 373 |
| P18T, Q60K | 331 | 352, 374 |
| S52M | 375 | 472, 569 |
| T45Q, S52L, L104E, G111R | 376 | 473, 570 |
| S42G | 377 | 474, 571 |
| Q62F | 378 | 475, 572 |
| S52Q | 379 | 476, 573 |
| S42A, L104Q, G111R | 380 | 477, 574 |
| S42A, S52Q, L104Q, G111R | 381 | 478, 575 |
| S52W, L104E | 382 | 479, 576 |
| S42C | 383 | 480, 577 |
| S52W | 384 | 481, 578 |
| S52M, L104Q | 385 | 482, 579 |
| S42L, S52L, Q62F, L104Q | 386 | 483, 580 |
| S42W | 387 | 484, 581 |
| S42Q | 388 | 485, 582 |
| S52L | 389 | 486, 583 |
| S52R | 390 | 487, 584 |
| L104E | 391 | 488, 585 |
| G111R | 392 | 489, 586 |
| S52E | 393 | 490, 587 |
| Q62Y | 394 | 491, 588 |
| T45Q, S52M, L104E | 395 | 492, 589 |
| S42N, L104Q, G111R | 396 | 493, 590 |
| S52M, V57L | 397 | 494, 591 |
| S42N, S52Q, Q62F | 398 | 495, 592 |
| S42A, S52L, L104E, G111R | 399 | 496, 593 |
| S42W, S52Q, V57L, Q62Y | 400 | 497, 594 |
| L104Q | 401 | 498, 595 |
| S42L, S52Q, L104E | 402 | 499, 596 |
| S42C, S52L | 403 | 500, 597 |
| S42W, S52R, Q62Y, L104Q | 404 | 501, 598 |
| T45Q, S52R, L104E | 405 | 502, 599 |
| S52R, Q62F, L104Q, G111R | 406 | 503, 600 |
| T45Q, S52L, V57L, L104E | 407 | 504, 601 |
| S52M, Q62Y | 408 | 505, 602 |
| Q62F, L104E, G111R | 409 | 506, 603 |
| T45Q, S52Q | 410 | 507, 604 |
| S52L, L104E | 411 | 508, 605 |
| S42V, S52E | 412 | 509, 606 |
| T45Q, S52R, G111R | 413 | 510, 607 |
| S42G, S52Q, L104E, G111R | 414 | 511, 608 |
| S42N, S52E, V57L, L104E | 415 | 512, 609 |
| S42C, S52M, Q62F | 416 | 513, 610 |
| S42L | 417 | 514, 611 |
| S42A | 418 | 515, 612 |
| S42G, S52L, Q62F, L104Q | 419 | 516, 613 |
| S42N | 420 | 517, 614 |
| P18T, S65A, S67V, F91S | 421 | 518, 615 |
| P18F, T39A, T45Q, T61R, S65N, S67L, E73G, R78G | 422 | 519, 616 |
| P18T, T45Q, T61R, S65N, S67L | 423 | 520, 617 |
| P18F, S65A, S67V, F91S | 424 | 521, 618 |
| P18F, T45Q, T61R, S65N, S67L, F91S, L104P | 425 | 522, 619 |
| P18S, L79P, L104M | 426 | 523, 620 |
| P18S, L104M | 427 | 524, 621 |
| L79P, L104M | 428 | 525, 622 |
| P18T, T45Q, L79P | 429 | 526, 623 |
| P18T, T45Q, T61R, S65H, S67H | 430 | 527, 624 |
| P18T, A81E | 431 | 528, 625 |
| P18S, D23Y, E37P, S52G, Q62M, G80S, A81P, G99Y, S112N | 432 | 529, 626 |
| A13R, D23Y, E37P, S42P, Q62Y, A81E | 433 | 530, 627 |
| A13R, D23Y, E37P, G99Y, S112N | 434 | 531, 628 |
| A13R, D23Y, E37P, Q62M, A77V, G80S, A81P, G99Y | 435 | 532, 629 |
| P18L, E37S, Q62M, G80S, A81P, G99Y, S112N | 436 | 533, 630 |
| P18S, L104T | 437 | 534, 631 |
| P18S, Q62H, L79Q, F91S | 438 | 535, 632 |
| T45Q, S52K, Q62F, L104Q, G111R | 439 | 536, 633 |
| T45Q, S52Q, Q62Y, L104Q, G111R | 440 | 537, 634 |
| T45Q, S52Q, Q62Y, L104E, G111R | 441 | 538, 635 |
| V57A, T61M, S65W, S67A, E96D, L104T | 442 | 539, 636 |
| P18L, V57T, T61S, S65Y, S67A, L104T | 443 | 540, 637 |
| P18T, T45Q | 444 | 541, 638 |
| P18L, V57A, T61M, S65W, S67A, L104T | 445 | 542, 639 |
| T61M, S65W, S67A, L104T | 446 | 543, 640 |
| P18S, V41A, S42G, T45G, L104N | 447 | 544, 641 |
| P18H, S42G, T45I, S52T, G53R, S54H, V57L, H59E, T61S, S65D, E68G, | 448 | 545, 642 |
| L104N | | |
| P18S, S42G, T45V, F58L, S67W, L104N | 449 | 546, 643 |
| P18S, T45I, L104N | 450 | 547, 644 |
| P18S, S42G, T45G, L104N, V106A | 451 | 548, 645 |
| P18H, H40R, S42G, T45I, S52T, G53R, S54H, V57L, H59E, T61S, S65D, | 452 | 549, 646 |
| E68G, L104Y, V106L, F108H | | |
| E37V, S42G, T45G, L104N | 453 | 550, 647 |
| P18S, T45Q, L79P, L104T | 454 | 551, 648 |
| P18L, Q62R | 455 | 552, 649 |
| A13R, D23Y, E37P, S42L, S52G, Q62Y, A81E | 456 | 553, 650 |
| P18L, H49R, L104T, D116N | 457 | 554, 651 |
| A13R, D23Y, E37P, Q62M, G80S, A81P, L104T | 458 | 555, 652 |
| S65T, L104T | 459 | 556, 653 |
| A13R, D23Y, E37P, S52G, V57A, Q62M, K70E, L104T | 460 | 557, 654 |
| P18L, A47V, Q62Y, E73D, L104T | 461 | 558, 655 |
| H40T, V41M, A47V, S52Q, Q62L, S65T, E73R, D97G, E98S, L104T, | 462 | 559, 656 |
| D116N | | |
| P18L, S42P, T45Q, T61G, S65H, S67E, L104T, D116N | 463 | 560, 657 |
| P18S, H40T, V41M, A47V, S52Q, Q62L, S65T, E73R, L104M, V106A | 464 | 561, 658 |
| H40T, V41M, A47V, S52Q, Q62L, S65T, E68G, E73R, D97G, E98S, L104T | 465 | 562, 659 |
| T45Q, S52E, L104E | 466 | 563, 660 |
| T45Q, S52E, Q62F, L104E | 467 | 564, 661 |
| P18F, T26M, L44V, Q62K, L79P, F91S, L104M, G111D | 468 | 565, 662 |
| P18S, T45S, T61K, S65W, S67A, F91S, G111R | 469 | 566, 663 |
| P18S, L79P, L104M, T107M | 470 | 567, 664 |
| P18S, S65W, S67A, M90V, V95A, L104Q, G111R | 471 | 568, 665 |
| P18S, A47G, L79P, F91S, L104M, T107A, R113W | 1551 | 1505, 1528 |
| P18T, D23G, S24A, N35D, H49L, L79P, F91S, L104M, G111R | 1552 | 1506, 1529 |
| V9L, P18S, Q60R, V75L, L79P, R89K, F91S, L104E, G111R | 1553 | 1507, 1530 |
| P18S, H49R, E73D, L79P, N85D, F91S, V95A, L104M, G111R | 1554 | 1508, 1531 |
| V11A, P18S, L79P, F91S, L104M, G111R | 1555 | 1509, 1532 |
| V11A, P18S, S54R, Q60P, Q62K, L79P, N85D, F91S, T107M | 1556 | 1510, 1533 |
| P18T, S52P, S65A, S67V, L79P, F91S, L104M, G111R | 1557 | 1511, 1534 |
| P18T, M36T, L79P, F91S, G111R | 1558 | 1512, 1535 |
| D8G, P18S, M36I, V38A, H49Q, A76E, F91S, L104M, T107A, R113W | 1559 | 1513, 1536 |
| P18S, S52P, S65A, S67V, L79P, F91S, L104M, T107S, R113W | 1560 | 1514, 1537 |
| T15I, P18T, L79P, F91S, L104M, G111R | 1561 | 1515, 1538 |
| P18F, T26M, L44V, Q62K, L79P, E82D, F91S, L104M, G111D | 1562 | 1516, 1539 |
| P18T, E37G, G53R, Q62K, L79P, F91S, E98D, L104M, T107M | 1563 | 1517, 1540 |
| P18L, K70E, L79P, F91S, V95A, G111R | 1564 | 1518, 1541 |
| V9I, Q12K, P18F, S65A, S67V, L79P, L104T, G111R, S112I | 1565 | 1519, 1542 |
| P18F, S65A, S67V, F91S, L104M, G111R | 1566 | 1520, 1543 |
| V9I, V10I, P18S, F20S, T45A, L79P, F91S, L104M, F108Y, G111R, S112V | 1567 | 1521, 1544 |
| V9L, P18L, L79P, M90I, F91S, T102S, L104M, G111R | 1568 | 1522, 1545 |
| P18C, T26M, L44V, M55I, Q62K, L79P, F91S, L104M, T107M | 1569 | 1523, 1546 |
| V9I, P18T, D23G, L79P, F91S, G111R | 1570 | 1524, 1547 |
| P18F, L79P, M90L, F91S, V95A, L104M, G111R | 1571 | 1525, 1548 |
| P18T, M36T, S65A, S67E, L79Q, A81T, F91S, G111R | 1572 | 1526, 1549 |
| V9L, P18T, Q62R, L79P, F91S, L104M, G111R | 1573 | 1527, 1550 |
| P18S, S65W, S67A, L104Q, G111R | 1574 | 1575, 1576 |
| P18T, G19D, M36T, S54N, L79P, L83Q, F91S, T107M, F108Y | 1577 | 1623, 1669 |
| V9L, P18L, M55V, S69L, L79P, A81E, F91S, T107M | 1578 | 1624, 1670 |
| P18F, H40Q, T61K, Q62K, L79P, F91S, L104M, T107V | 1579 | 1625, 1671 |
| P18S, Q32R, Q62K, R78G, L79P, F91S, T107A, R113W | 1580 | 1626, 1672 |
| Q12H, P18T, L21S, G22S, V57A, Q62R, L79P, F91S, T107M | 1581 | 1627, 1673 |
| V9I, P18S, S24P, H49Q, F58Y, Q60R, Q62K, L79P, F91S, T107M | 1582 | 1628, 1674 |
| P18T, W46C, H49R, S65A, S67V, A76T, L79P, S87T, L104M | 1583 | 1629, 1675 |
| P18S, S42T, E51G, L79P, F91S, G92W, T107M | 1584 | 1630, 1676 |
| V10F, T15S, P18L, R48Q, L79P, F91S, T107M, V115M | 1585 | 1631, 1677 |
| P18S, L21M, Y30F, N35D, R84W, F91S, T107M, D116G | 1586 | 1632, 1678 |
| P18F, E51V, S54G, Q60R, L79Q, E82G, S87T, M90I, F91S, G92R, T107M | 1587 | 1633, 1679 |
| Q16H, P18F, F91S, T107M | 1588 | 1634, 1680 |
| P18T, D23G, Q60R, S67L, L79P, F91S, T107M, V115A | 1589 | 1635, 1681 |
| D8G, V9I, V11A, P18T, T26M, S52P, L79P, F91S, G92A, T107L, V115A | 1590 | 1636, 1682 |
| V9I, P18F, A47E, G50S, E68G, L79P, F91S, T107M | 1591 | 1637, 1683 |
| P18S, M55I, Q62K, S69P, L79P, F91S, T107M | 1592 | 1638, 1684 |
| P18T, T39S, S52P, S54R, L79P, F91S, T107M | 1593 | 1639, 1685 |
| P18S, D23N, L79P, F91S, T107M, S114N | 1594 | 1640, 1686 |
| P18S, P34S, E51V, L79P, F91S, G111R | 1595 | 1641, 1687 |
| P18S, H59N, V75A, L79P, A81T, F91S, L104M, T107M | 1596 | 1642, 1688 |
| P18S, W46R, E68D, L79P, F91S, T107M, R113G | 1597 | 1643, 1689 |
| V9L, P18F, T45A, S65A, S67V, R78K, L79V, F91S, T107M, S114T | 1598 | 1644, 1690 |
| P18T, M55L, T61R, L79P, F91S, V106I, T107M | 1599 | 1645, 1691 |
| T15I, P18S, V33M, N35F, T39S, M55L, R78S, L79P, F91S, T107M | 1600 | 1646, 1692 |
| P18S, Q62K, K70E, L79P, F91S, G92E, R113W | 1601 | 1647, 1693 |
| P18F, F20I, T26M, A47V, E51K, L79P, F91S | 1602 | 1648, 1694 |
| P18T, D23A, Q60H, L79P, M90V, F91S, T107M | 1603 | 1649, 1695 |
| P18S, D23G, C29R, N35D, E37G, M55I, Q62K, S65A, S67G, R78G, L79P, | 1604 | 1650, 1696 |
| F91S, L104M, T107M, Q110R | | |
| A13E, P18S, M36R, Q62K, S67T, L79P, N85D, F91S, T107M | 1605 | 1651, 1697 |
| V9I, P18T, H49R, L79P, N85D, F91S, L104T, T107M | 1606 | 1652, 1698 |
| V9A, P18F, T61S, Q62L, L79P, F91S, G111R | 1607 | 1653, 1699 |
| D8E, P18T, T61A, L79P, F91S, T107M | 1608 | 1654, 1700 |
| P18S, V41A, H49R, S54C, L79S, N85Y, L88P, F91S, L104M, T107M | 1609 | 1655, 1701 |
| V11E, P18H, F20Y, V25E, N35S, H49R, L79P, F91S, T107M, G111R | 1610 | 1656, 1702 |
| V11A, P18F, D23A, L79P, G80D, V95A, T107M | 1611 | 1657, 1703 |
| P18S, K70R, L79P, F91S, G111R | 1612 | 1658, 1704 |
| V9L, V11M, P18S, N35S, S54G, Q62K, L79P, L104M, T107M, V115M | 1613 | 1659, 1705 |
| V9L, P18Y, V25A, V38G, M55V, A77T, L79P, M90I, F91S, L104M | 1614 | 1660, 1706 |
| V10G, P18T, L72Q, L79P, F91S, T107M | 1615 | 1661, 1707 |
| P18S, H59R, A76G, R78S, L79P | 1616 | 1662, 1708 |
| V9A, P18S, M36T, S65G, L79P, F91S, L104T, G111R, S112I | 1617 | 1663, 1709 |
| P18T, S52A, V57A, Q60R, Q62K, S65C, L79P, F91T, N100Y, T107M | 1618 | 1664, 1710 |
| V11A, P18F, N35D, A47E, Q62K, L79P, F91S, G99D, T107M, S114N | 1619 | 1665, 1711 |
| V11A, P18T, N35S, L79P, S87T, F91S | 1620 | 1666, 1712 |
| V9D, V11M, Q12L, P18S, E37V, M55I, Q60R, K70Q, L79P, F91S, L104M, | 1621 | 1667, 1713 |
| T107M | | |
| T15S, P18S, Y30H, Q32L, Q62R, L79P, F91S, T107M | 1622 | 1668, 1714 |

TABLE 6
Exemplary variant NKp30 polypeptides

| | | IgC-like |
|---|---|---|
| | ECD | domain |
| | SEQ | SEQ ID |
| Mutation(s) | ID NO | NO |
| Wild-type | 54 | 1183 |
| L30V/A60V/S64P/S86G | 1178 | 1184 |
| L30V | 1179 | 1185 |
| A60V | 1180 | 1186 |
| S64P | 1181 | 1187 |
| S86G | 1182 | 1188 |

TABLE 7
Exemplary variant CD86 polypeptides

| | ECD | IgV |
|---|---|---|
| | SEQ | SEQ |
| Mutation(s) | ID NO | ID NO |
| Wild-type | 29 | 1195 |
| Q35H/H90L/Q102H | 1191 | 1196 |
| Q35H | 1192 | 1197 |
| H90L | 1193 | 1198 |
| Q102H | 1194 | 1199 |

TABLE 8
Exemplary variant PD-L2 polypeptides

| | ECD | |
|---|---|---|
| | SEQ | IgV SEQ ID |
| Mutation(s) | ID NO | NO |
| Wild-type | 31 | 1203, 1263 |
| H15Q | 1204 | 1281, 1357 |
| N24D | 1205 | 1282, 1358 |
| E44D | 1206 | 1283, 1359 |
| V89D | 1207 | 1284, 1360 |
| Q82R/V89D | 1208 | 1285, 1361 |
| E59G/Q82R | 1209 | 1286, 1362 |
| S39I/V89D | 1210 | 1287, 1363 |
| S67L/V89D | 1211 | 1288, 1364 |
| S67L/I85F | 1212 | 1289, 1365 |
| S67L/I86T | 1213 | 1290, 1366 |
| H15Q/K65R | 1214 | 1291, 1367 |
| H15Q/Q72H/V89D | 1215 | 1292, 1368 |
| H15Q/S67L/R76G | 1216 | 1293, 1369 |
| H15Q/R76G/I85F | 1217 | 1294, 1370 |
| H15Q/T47A/Q82R | 1218 | 1295, 1371 |
| H15Q/Q82R/V89D | 1219 | 1296, 1372 |
| H15Q/C23S/I86T | 1220 | 1297, 1373 |
| H15Q/S39I/I86T | 1221 | 1298, 1374 |
| H15Q/R76G/I85F | 1222 | 1299, 1375 |
| E44D/V89D/W91R | 1223 | 1300, 1376 |
| I13V/S67L/V89D | 1224 | 1301, 1377 |
| H15Q/S67L/I86T | 1225 | 1302, 1378 |
| I13V/H15Q/S67L/I86T | 1226 | 1303, 1379 |
| I13V/H15Q/E44D/V89D | 1227 | 1304, 1380 |
| I13V/S39I/E44D/Q82R/V89D | 1228 | 1305, 1381 |
| I13V/E44D/Q82R/V89D | 1229 | 1306, 1382 |
| I13V/Q72H/R76G/I86T | 1230 | 1307, 1383 |
| I13V/H15Q/R76G/I85F | 1231 | 1308, 1384 |
| H15Q/S39I/R76G/V89D | 1232 | 1309, 1385 |
| H15Q/S67L/R76G/I85F | 1233 | 1310, 1386 |
| H15Q/T47A/Q72H/R76G/I86T | 1234 | 1311, 1387 |
| H15Q/T47A/Q72H/R76G | 1235 | 1312, 1388 |
| I13V/H15Q/T47A/Q72H/R76G | 1236 | 1313, 1389 |
| H15Q/E44D/R76G/I85F | 1237 | 1314, 1390 |
| H15Q/S39I/S67L/V89D | 1238 | 1315, 1391 |
| H15Q/N32D/S67L/V89D | 1239 | 1316, 1392 |
| N32D/S67L/V89D | 1240 | 1317, 1393 |
| H15Q/S67L/Q72H/R76G/V89D | 1241 | 1318, 1394 |
| H15Q/Q72H/Q74R/R76G/I86T | 1242 | 1319, 1395 |
| G28V/Q72H/R76G/I86T | 1243 | 1320, 1396 |
| I13V/H15Q/S39I/E44D/S67L | 1244 | 1321, 1397 |
| E44D/S67L/Q72H/Q82R/V89D | 1245 | 1322, 1398 |
| H15Q/V89D | 1246 | 1323, 1399 |
| H15Q/T47A | 1247 | 1324, 1400 |
| I13V/H15Q/Q82R | 1248 | 1325, 1401 |
| I13V/H15Q/V89D | 1249 | 1326, 1402 |
| I13V/S67L/Q82R/V89D | 1250 | 1327, 1403 |
| I13V/H15Q/Q82R/V89D | 1251 | 1328, 1404 |
| H15Q/V31M/S67L/Q82R/V89D | 1252 | 1329, 1405 |
| I13V/H15Q/T47A/Q82R | 1253 | 1330, 1406 |
| I13V/H15Q/V31A/N45S/Q82R/V89D | 1254 | 1331, 1407 |
| H15Q/T47A/H69L/Q82R/V89D | 1256 | 1333, 1409 |
| I13V/H15Q/T47A/H69L/R76G/V89D | 1257 | 1334, 1410 |
| I12V/I13V/H15Q/T47A/Q82R/V89D | 1258 | 1335, 1411 |
| I13V/H15Q/R76G/D77N/Q82R/V89D | 1259 | 1336, 1412 |
| I13V/H15Q/T47A/R76G/V89D | 1260 | 1337, 1413 |
| I13V/H15Q/T47A/Q82R/V89D | 1261 | 1338, 1414 |
| I13V/H15Q/N24D/Q82R/V89D | 1262 | 1339, 1415 |
| I13V/H15Q/I36V/T47A/S67L/V89D | 1264 | 1340, 1416 |
| H15Q/T47A/K65R/S67L/Q82R/V89D | 1265 | 1341, 1417 |
| H15Q/L33P/T47A/S67L/P71S/V89D | 1266 | 1342, 1418 |
| I13V/H15Q/Q72H/R76G/I86T | 1267 | 1343, 1419 |
| H15Q/T47A/S67L/Q82R/V89D | 1268 | 1344, 1420 |
| F2L/H15Q/D46E/T47A/Q72H/R76G/Q82R/V89D | 1269 | 1345, 1421 |
| I13V/H15Q/L33F/T47A/Q82R/V89D | 1270 | 1346, 1422 |
| I13V/H15Q/T47A/E58G/S67L/Q82R/V89D | 1271 | 1347, 1423 |
| H15Q/N24S/T47A/Q72H/R76G/V89D | 1272 | 1348, 1424 |
| I13V/H15Q/E44V/T47A/Q82R/V89D | 1273 | 1349, 1425 |
| H15Q/N18D/T47A/Q72H/V73A/R76G/I86T/V89D | 1274 | 1350, 1426 |
| I13V/H15Q/T37A/E44D/S48C/S67L/Q82R/V89D | 1275 | 1351, 1427 |
| H15Q/L33H/S67L/R76G/Q82R/V89D | 1276 | 1352, 1428 |
| I13V/H15Q/T47A/Q72H/R76G/I86T | 1277 | 1353, 1429 |
| H15Q/S39I/E44D/Q72H/V75G/R76G/Q82R/V89D | 1278 | 1354, 1430 |
| H15Q/T47A/S67L/R76G/Q82R/V89D | 1279 | 1355, 1431 |
| I13V/H15Q/T47A/S67L/Q72H/R76G/Q82R/V89D | 1280 | 1356, 1432 |

[0257] The number of such non-affinity modified or affinity modified IgSF domains present in a “stacked” immunomodulatory protein construct (whether non-wild type combinations or non-wild type arrangements) is at least 2, 3, 4, or 5 and in some embodiments exactly 2, 3, 4, or 5 IgSF domains (whereby determination of the number of affinity modified IgSF domains disregards any non-specific binding fractional sequences thereof and/or substantially immunologically inactive fractional sequences thereof).

[0258] In some embodiments of a stacked immunomodulatory protein provided herein, the number of IgSF domains is at least 2 wherein the number of affinity modified and the number of non-affinity modified IgSF domains is each independently at least: 0, 1, 2, 3, 4, 5, or 6. Thus, the number of affinity modified IgSF domains and the number of non-affinity modified IgSF domains, respectively, (affinity modified IgSF domain: non-affinity modified IgSF domain), can be exactly or at least: 2:0 (affinity modified: wild-type), 0:2, 2:1, 1:2, 2:2, 2:3, 3:2, 2:4, 4:2, 1:1, 1:3, 3:1, 1:4, 4:1, 1:5, or 5:1.

[0259] In some embodiments of a stacked immunomodulatory protein, at least two of the non-affinity modified and/or affinity modified IgSF domains are identical IgSF domains.

[0260] In some embodiments, a stacked immunomodulatory protein provided herein comprises at least two affinity modified and/or non-affinity modified IgSF domains from a single IgSF member but in a non-wild-type arrangement (alternatively, “permutation”). One illustrative example of a non-wild type arrangement or permutation is an immunomodulatory protein comprising a non-wild-type order of affinity modified and/or non-affinity modified IgSF domain sequences relative to those found in the wild-type PD-L1 whose IgSF domain sequences served as the source of the variant IgSF domains as provided herein. Thus, in one example, the immunomodulatory protein can comprise an IgV proximal and an IgC distal to the transmembrane domain albeit in a non-affinity modified and/or affinity modified form. The presence, in an immunomodulatory protein provided herein, of both non-wild-type combinations and non-wild-type arrangements of non-affinity modified and/or affinity modified IgSF domain is also within the scope of the provided subject matter.

[0261] In some embodiments of a stacked immunomodulatory protein, the non-affinity modified and/or affinity modified IgSF domains are non-identical (i.e., different) IgSF domains. Non-identical affinity modified IgSF domains specifically bind, under specific binding conditions, different cognate binding partners and are “non-identical” irrespective of whether or not the wild-type or unmodified IgSF domains from which they are engineered was the same. Thus, for example, a non-wild-type combination of at least two non-identical IgSF domains in an immunomodulatory protein can comprise at least one IgSF domain sequence whose origin is from and unique to one PD-L1, and at least one of a second IgSF domain sequence whose origin is from and unique to another IgSF family member that is not PD-L1, wherein the IgSF domains of the immunomodulatory protein are in non-affinity modified and/or affinity modified form. However, in alternative embodiments, the two non-identical IgSF domains originate from the same IgSF domain sequence but at least one is affinity modified such that they specifically bind to different cognate binding partners.

[0262] A plurality of non-affinity modified and/or affinity modified IgSF domains in a stacked immunomodulatory protein polypeptide chain need not be covalently linked directly to one another. In some embodiments, an intervening span of one or more amino acid residues indirectly covalently bonds the non-affinity modified and/or affinity modified IgSF domains to each other. The linkage can be via the N-terminal to C-terminal residues.

[0263] In some embodiments, the two or more IgSF domain, including a vIgD of PD-L1 and one or more additional IgSF domain (e.g. second or third variant IgSF domain) from another IgSF family member, are covalently or non-covalently linked. In some embodiments, the two or more IgSF domains are linked directly or indirectly, such as via a linker. In some embodiments, an intervening span of one or more amino acid residues indirectly covalently bonds IgSF domains to each other. The linkage can be via the N-terminal to C-terminal residues. In some embodiments, the linkage can be made via side chains of amino acid residues that are not located at the N-terminus or C-terminus of the IgSF domain(s). Thus, linkages can be made via terminal or internal amino acid residues or combinations thereof.

[0264] In some embodiments, the immunomodulatory protein contains at least two IgSF domains, each linked directly or indirectly via a linker. In some embodiments, the immunomodulatory protein contains at least three immunomodulatory proteins, each linked directly or indirectly via a linker. Various configurations are shown in FIGS. 5A and 5B.

[0265] In some embodiments, one or more “peptide linkers” link the vIgD of PD-L1 and an one or more additional IgSF domain (e.g. second or third variant IgSF domain). In some embodiments, a peptide linker can be a single amino acid residue or greater in length. In some embodiments, the peptide linker has at least one amino acid residue but is no more than 20, 19, 18, 17, 16, 15, 14, 13, 12, 11, 10, 9, 8, 7, 6, 5, 4, 3, 2, or 1 amino acid residues in length. In some embodiments, the linker is a flexible linker. In some embodiments, the linker is (in one-letter amino acid code): GGGGS (“4GS”; SEQ ID NO: 1942) or multimers of the 4GS linker, such as repeats of 2, 3, 4, or 5 4GS linkers. In some embodiments, the peptide linker is (GGGGS)₂ (SEQ ID NO: 240) or (GGGGS)₃ (SEQ ID NO: 239). In some embodiments, the linker (in one-letter amino acid code) is GSGGGGS (SEQ ID NO:1941). In some embodiments, the linker also can include a series of alanine residues alone or in addition to another peptide linker (such as a 4GS linker or multimer thereof). In some embodiments, the number of alanine residues in each series is: 2, 3, 4, 5, or 6 alanines. In some embodiments, the linker also can include a series of alanine residues alone or in addition to another peptide linker (such as a 4GS linker or multimer thereof). In some embodiments, the number of alanine residues in each series is: 2, 3, 4, 5, or 6 alanines. In some embodiments, the linker is a rigid linker. For example, the linker is an α-helical linker. In some embodiments, the linker is (in one-letter amino acid code): EAAAK or multimers of the EAAAK linker, such as repeats of 2, 3, 4, or 5 EAAAK linkers, such as set forth in SEQ ID NO: 2022 (1×EAAAK), SEQ ID NO: 2023 (3×EAAAK) or SEQ ID NO: 2024 (5×EAAAK). In some embodiments, the linker can further include amino acids introduced by cloning and/or from a restriction site, for example the linker can include the amino acids GS (in one-letter amino acid code) as introduced by use of the restriction site BAMHI. For example, in some embodiments, the linker (in one-letter amino acid code) is GSGGGGS (SEQ ID NO:1941), GS(G₄S)₃ (SEQ ID NO: 2031), or GS(G₄S)₅ (SEQ ID NO: 2032). In some examples, the linker is a 2×GGGGS followed by three alanines (GGGGSGGGGSAAA; SEQ ID NO: 241). In some cases, various combinations of peptide is used linkers.

[0266] In some embodiments, the non-affinity modified and/or affinity modified IgSF domains are linked by “wild-type peptide linkers” inserted at the N-terminus and/or C-terminus of a non-affinity modified and/or affinity modified IgSF domains. These linkers are also called leading sequences (N-terminal to non-affinity modified or affinity modified IgSF domain) or trailing sequences (C-terminal to non-affinity modified or affinity modified IgSF domain), and sequences that exist in the wild-type protein that span immediately outside the structural prediction of the Ig fold of the IgSF. In some embodiments, the “wild-type linker” is an amino acid sequence that exists after the signal sequence, but before in the IgSF domain, such as the defined IgV domain, in the amino acid sequence of the wild-type protein. In some embodiments, the “wild-type” linker is an amino acid sequence that exists immediately after the IgSF domain, such as immediately after the defined IgV domain but before the IgC domain, in the amino acid sequence of the wild-type protein. These linker sequences can contribute to the proper folding and function of the neighboring IgSF domain(s). In some embodiments, there is present a leading peptide linker inserted at the N-terminus of the first IgSF domain and/or a trailing sequence inserted at the C-terminus of the first non-affinity modified and/or affinity modified IgSF domain. In some embodiments, there is present a second leading peptide linker inserted at the N-terminus of the second IgSF domain and/or a second trailing sequence inserted at the C-terminus of the second non-affinity modified and/or affinity modified IgSF domain. When the first and second non-affinity modified and/or affinity modified IgSF domains are derived from the same parental protein and are connected in the same orientation, wild-type peptide linkers between the first and second non-affinity modified and/or affinity modified IgSF domains are not duplicated. For example, when the first trailing wild-type peptide linker and the second leading wild-type peptide linker are the same, the Type II immunomodulatory protein does not comprise either the first trailing wild-type peptide linker or the second leading wild-type peptide linker.

[0267] In some embodiments, the Type II immunomodulatory protein comprises a first leading wild-type peptide linker inserted at the N-terminus of the first non-affinity modified and/or affinity modified IgSF domain, wherein the first leading wild-type peptide linker comprises at least 5 (such as at least about any of 6, 7, 8, 9, 10, 11, 12, 13, 14, 15, or more) consecutive amino acids from the intervening sequence in the wild-type protein from which the first non-affinity modified and/or affinity modified IgSF domain is derived between the parental IgSF domain and the immediately preceding domain (such as a signal peptide or an IgSF domain). In some embodiments, the first leading wild-type peptide linker comprises the entire intervening sequence in the wild-type protein from which the first non-affinity modified and/or affinity modified IgSF domain is derived between the parental IgSF domain and the immediately preceding domain (such as a signal peptide or an IgSF domain).

[0268] In some embodiments, the Type II immunomodulatory protein further comprises a first trailing wild-type peptide linker inserted at the C-terminus of the first non-affinity modified and/or affinity modified IgSF domain, wherein the first trailing wild-type peptide linker comprises at least 5 (such as at least about any of 6, 7, 8, 9, 10, 11, 12, 13, 14, 15, or more) consecutive amino acids from the intervening sequence in the wild-type protein from which the first non-affinity modified and/or affinity modified IgSF domain is derived between the parental IgSF domain and the immediately following domain (such as an IgSF domain or a transmembrane domain). In some embodiments, the first trailing wild-type peptide linker comprises the entire intervening sequence in the wild-type protein from which the first non-affinity modified and/or affinity modified IgSF domain is derived between the parental IgSF domain and the immediately following domain (such as an IgSF domain or a transmembrane domain).

[0269] In some embodiments, the Type II immunomodulatory protein further comprises a second leading wild-type peptide linker inserted at the N-terminus of the second non-affinity modified and/or affinity modified IgSF domain, wherein the second leading wild-type peptide linker comprises at least 5 (such as at least about any of 6, 7, 8, 9, 10, 11, 12, 13, 14, 15, or more) consecutive amino acids from the intervening sequence in the wild-type protein from which the second non-affinity modified and/or affinity modified IgSF domain is derived between the parental IgSF domain and the immediately preceding domain (such as a signal peptide or an IgSF domain). In some embodiments, the second leading wild-type peptide linker comprises the entire intervening sequence in the wild-type protein from which the second non-affinity modified and/or affinity modified IgSF domain is derived between the parental IgSF domain and the immediately preceding domain (such as a signal peptide or an IgSF domain).

[0270] In some embodiments, the Type II immunomodulatory protein further comprises a second trailing wild-type peptide linker inserted at the C-terminus of the second non-affinity modified and/or affinity modified IgSF domain, wherein the second trailing wild-type peptide linker comprises at least 5 (such as at least about any of 6, 7, 8, 9, 10, 11, 12, 13, 14, 15, or more) consecutive amino acids from the intervening sequence in the wild-type protein from which the second non-affinity modified and/or affinity modified IgSF domain is derived between the parental IgSF domain and the immediately following domain (such as an IgSF domain or a transmembrane domain). In some embodiments, the second trailing wild-type peptide linker comprises the entire intervening sequence in the wild-type protein from which the second non-affinity modified and/or affinity modified IgSF domain is derived between the parental IgSF domain and the immediately following domain (such as an IgSF domain or a transmembrane domain).

[0271] In some embodiments, the two or more IgSF domain, including a vIgD of PD-L1 and one or more additional IgSF domain (e.g. second and/or third variant IgSF domain) from another IgSF family member, are linked or attached to a multimerization domain, such as to an Fc to form an Fc fusion, which, upon expression in a cell can, in some aspects, produce a dimeric multi-domain stack immunomodulatory protein. Thus, also provided are dimeric multi-domain immunomodulatory proteins.

[0272] In some embodiments, the variant PD-L1 polypeptide and one or more additional IgSF domain are independently linked, directly or indirectly, to the N- or C-terminus of a multimerization domain, such as an Fc region. In some embodiments, the variant PD-L1 polypeptide and at least one of the one or more additional IgSF domain are linked, directly or indirectly, and one of the variant PD-L1 and one of the one or more additional IgSF domain is also linked, directly or indirectly, to the N- or C-terminus of a multimerization domain, such as an Fc region. In some embodiments, the N- or C-terminus of a multimerization domain, such as an Fc region is linked to the variant PD-L1 polypeptide or the one or more additional IgSF domain and the other of the N- or C-terminus of the Fc region is linked to the other of the PD-L1 variant or another of the one or more additional IgSF domain. In some embodiments, linkage to the multimerization domain, such as to an Fc is via a peptide linker, e.g. a peptide linker, such as described above. In some embodiments, linkage between the variant PD-L1 and the one or more additional IgSF domain is via a peptide linker, e.g. a peptide linker, such as described above. In some embodiments, the vIgD of PD-L1, the one or more additional IgSF domains, and the multimerization domain, such as an Fc domain can be linked together in any of numerous configurations as depicted in FIGS. 5A and 5B. Exemplary configurations are described in the Examples.

[0273] In some embodiments, the stacked immunomodulatory protein is a dimer formed by two immunomodulatory Fc fusion polypeptides. Also provided are nucleic acid molecules encoding any of the stacked immunomodulatory proteins. In some embodiments, the dimeric multi-domain stack immunomodulatory protein can be produced in cells by expression, or in some cases co-expression, of stack immunomodulatory Fc fusion polypeptides, such as described above in accord with generating dimeric Fc fusion proteins.

[0274] In some embodiments, the dimeric multi-domain stack immunomodulatory protein is divalent for each Fc region, monovalent for each subunit, or divalent for one subunit and tetravalent for the other.

[0275] In some embodiments, the dimeric multi-domain stack immunomodulatory protein is a homodimeric multi-domain stack Fc protein. In some embodiments, the dimeric multi-domain stack immunomodulatory protein comprises a first stack immunomodulatory Fc fusion polypeptide and a second stack immunomodulatory Fc fusion polypeptide in which the first and second polypeptide are the same. In some embodiments, the multi-domain stack molecule contains a first Fc fusion polypeptide containing a variant PD-L1 and a second IgSF domain and a second Fc fusion polypeptide containing the variant PD-L1 and the second IgSF domain. In some embodiments, the multi-domain stack molecule contains a first Fc fusion polypeptide containing a variant PD-L1, a second IgSF domain, and a third IgSF domain and a second Fc fusion polypeptide containing the variant PD-L1, the second IgSF domain, and the third IgSF domain. In some embodiments, the Fc portion of the first and/or second fusion polypeptide can be any Fc as described above. In some embodiments, the Fc portion or region of the first and second fusion polypeptide is the same.

[0276] In some embodiments, the multi-domain stack molecule is heterodimeric, comprising two different Fc fusion polypeptides, e.g. a first and a second Fc fusion polypeptide, wherein at least one is an Fc fusion polypeptide containing at least one is an Fc fusion polypeptide containing a variant PD-L1 polypeptide and/or at least one second IgSF domain (e.g. second variant IgSF domain). In some embodiments, the first or second Fc fusion polypeptide further contains a third IgSF domain (e.g. third variant IgSF domain).

[0277] In some embodiments, the multi-domain stack molecule contains a first Fc fusion polypeptide containing a variant PD-L1 and a second Fc fusion polypeptide containing at a second IgSF domain, in which, in some cases, the first or second Fc fusion polypeptide additionally contains a third IgSF domain. In some embodiments, the multi-domain stack molecule contains a first Fc fusion polypeptide containing a variant PD-L1, a second IgSF domain, and in some cases, a third IgSF domain and a second Fc fusion polypeptide that is not linked to either a variant PD-L1 polypeptide or an additional IgSF domain. In some embodiments, the Fc portion or region of the first and second fusion polypeptide is the same. In some embodiments, the Fc portion or region of the first and second fusion polypeptide is different.

[0278] In some embodiments, the multi-domain stack molecule contains a first Fc fusion polypeptide containing 1, 2, 3, 4 or more variant PD-L1 polypeptides and 1, 2, 3, 4 or more additional IgSF domains, wherein the total number of IgSF domains in the first stack Fc fusion polypeptide is greater than 2, 3, 4, 5, 6 or more. In one example of such an embodiment, the second stack Fc fusion polypeptide contains 1, 2, 3, 4 or more variant PD-L1 polypeptides and 1, 2, 3, 4 or more additional IgSF domains, wherein the total number of IgSF domains in the second stack Fc fusion polypeptide is greater than 2, 3, 4, 5, 6 or more. In another example of such an embodiment, the second Fc fusion polypeptide is not linked to either a variant PD-L1 polypeptide or additional IgSF domain.

[0279] In some embodiments, the heterodimeric stack molecule contains a first stack immunomodulatory Fc fusion polypeptide and a second stack immunomodulatory Fc fusion polypeptide in which the first and second polypeptide are different. In some embodiments, a heterodimeric stack molecule contains a first Fc polypeptide fusion containing an Fc region and a a first variant PD-L1 polypeptide and/or second IgSF domain (e.g. second variant IgSF domain) and a second polypeptide fusion containing an Fc region and the other of the first variant PD-L1 polypeptide or the second IgSF domain. In some embodiments, a heterodimeric stack molecule contains a first Fc polypeptide fusion containing an Fc region and a first variant PD-L1 polypeptide and/or second IgSF domain (e.g. second variant IgSF domain) and a second Fc polypeptide fusion containing an Fc region and the first variant PD-L1 polypeptide and second IgSF domain (e.g. second variant IgSF domain) but in a different orientation or configuration from the first Fc region. In some embodiments, the first and/or second Fc fusion polypeptide also contains a third IgSF domain (e.g. third variant IgSF domain).

[0280] In some embodiments, the Fc domain of one or both of the first and second stacked immunomodulatory Fc fusion polypeptide comprises a modification (e.g. substitution) such that the interface of the Fc molecule is modified to facilitate and/or promote heterodimerization. In some embodiments, modifications include introduction of a protuberance (knob) into a first Fc polypeptide and a cavity (hole) into a second Fc polypeptide such that the protuberance is positionable in the cavity to promote complexing of the first and second Fc-containing polypeptides. Amino acids targeted for replacement and/or modification to create protuberances or cavities in a polypeptide are typically interface amino acids that interact or contact with one or more amino acids in the interface of a second polypeptide.

[0281] In some embodiments, a sequence of amino acids is added preceding the Fc sequence for constructs in which the Fc sequence was the N-terminal portion of the sequence. In some cases, the sequence of amino acids HMSSVSAQ (SEQ ID NO:1156) is added immediately preceding the Fc sequence for constructs in which the Fc sequence was the N-terminal portion of the sequence. In some embodiments, a heterodimeric stack molecule contains a first Fc polypeptide fusion containing an Fc region (knob) and a first variant polypeptide and/or second IgSF domain (e.g. second variant IgSF domain) and a second Fc polypeptide fusion containing an Fc region (hole) contains a stuffer sequence HMSSVSAQ (SEQ ID NO:1156) immediately preceding both Fc regions of the first and second Fc polypeptide fusion.

[0282] In some embodiments, a first polypeptide that is modified to contain protuberance (hole) amino acids include replacement of a native or original amino acid with an amino acid that has at least one side chain which projects from the interface of the first polypeptide and is therefore positionable in a compensatory cavity (hole) in an adjacent interface of a second polypeptide. Most often, the replacement amino acid is one which has a larger side chain volume than the original amino acid residue. One of skill in the art knows how to determine and/or assess the properties of amino acid residues to identify those that are ideal replacement amino acids to create a protuberance. In some embodiments, the replacement residues for the formation of a protuberance are naturally occurring amino acid residues and include, for example, arginine (R), phenylalanine (F), tyrosine (Y), or tryptophan (W). In some examples, the original residue identified for replacement is an amino acid residue that has a small side chain such as, for example, alanine, asparagine, aspartic acid, glycine, serine, threonine, or valine.

[0283] In some embodiments, a second polypeptide that is modified to contain a cavity (hole) is one that includes replacement of a native or original amino acid with an amino acid that has at least one side chain that is recessed from the interface of the second polypeptide and thus is able to accommodate a corresponding protuberance from the interface of a first polypeptide. Most often, the replacement amino acid is one which has a smaller side chain volume than the original amino acid residue. One of skill in the art knows how to determine and/or assess the properties of amino acid residues to identify those that are ideal replacement residues for the formation of a cavity. Generally, the replacement residues for the formation of a cavity are naturally occurring amino acids and include, for example, alanine (A), serine (S), threonine (T) and valine (V). In some examples, the original amino acid identified for replacement is an amino acid that has a large side chain such as, for example, tyrosine, arginine, phenylalanine, or tryptophan.

[0284] The CH3 interface of human IgG1, for example, involves sixteen residues on each domain located on four anti-parallel β-strands which buries 1090 Å2 from each surface (see e.g., Deisenhofer et al. (1981) Biochemistry, 20:2361-2370; Miller et al., (1990) J Mol. Biol., 216, 965-973; Ridgway et al., (1996) Prot. Engin., 9: 617-621; U.S. Pat. No. 5,731,168). Modifications of a CH3 domain to create protuberances or cavities are described, for example, in U.S. Pat. No. 5,731,168; International Patent Applications WO98/50431 and WO 2005/063816; and Ridgway et al., (1996) Prot. Engin., 9: 617-621. In some examples, modifications of a CH3 domain to create protuberances or cavities are typically targeted to residues located on the two central anti-parallel β-strands. The aim is to minimize the risk that the protuberances which are created can be accommodated by protruding into the surrounding solvent rather than being accommodated by a compensatory cavity in the partner CH3 domain.

[0285] In some embodiments, the heterodimeric molecule contains a T366W mutation in the CH3 domain of the “knobs chain” and T366S, L368A, Y407V mutations in the CH3 domain of the “hole chain”. In some cases, an additional interchain disulfide bridge between the CH3 domains can also be used (Merchant, A. M., et al., Nature Biotech. 16 (1998) 677-681) e.g. by introducing a Y349C mutation into the CH3 domain of the “knobs” or “hole” chain and a E356C mutation or a S354C mutation into the CH3 domain of the other chain. In some embodiments, the heterodimeric molecule contains S354C, T366W mutations in one of the two CH3 domains and Y349C, T366S, L368A, Y407V mutations in the other of the two CH3 domains. In some embodiments, the heterodimeric molecule comprises E356C, T366W mutations in one of the two CH3 domains and Y349C, T366S, L368A, Y407V mutations in the other of the two CH3 domains. In some embodiments, the heterodimeric molecule comprises Y349C, T366W mutations in one of the two CH3 domains and E356C, T366S, L368A, Y407V mutations in the other of the two CH3 domains. In some embodiments, the heterodimeric molecule comprises Y349C, T366W mutations in one of the two CH3 domains and S354C, T366S, L368A, Y407V mutations in the other of the two CH3 domains. Examples of other knobs-in-holes technologies are known in the art, e.g. as described by EP 1 870 459 A1.

[0286] In some embodiments, the Fc region of the heterodimeric molecule additionally can contain one or more other Fc mutation, such as any described above. In some embodiments, the heterodimer molecule contains an Fc region with a mutation that reduces effector function.

[0287] In some embodiments, an Fc variant containing CH3 protuberance(knob) or cavity(hole) modifications can be joined to a stacked immunomodulatory polypeptide anywhere, but typically via its N- or C-terminus, to the N- or C-terminus of a first and/or second stacked immunomodulatory polypeptide, such as to form a fusion polypeptide. The linkage can be direct or indirect via a linker. Typically, a knob and hole molecule is generated by co-expression of a first stacked immunomodulatory polypeptide linked to an Fc variant containing CH3 protuberance modification(s) with a second stacked immunomodulatory polypeptide linked to an Fc variant containing CH3 cavity modification(s).

[0288] There is provided herein a homodimeric multi-domain stack molecule produced from a stack immunomodulatory Fc fusion polypeptide containing an IgSF domain, e.g. IgV domain, of a variant PD-L1 polypeptide and a second IgSF domain, e.g. IgV, of a variant CD155 polypeptide. In some embodiments, the first and second immunomodulatory Fc fusion polypeptide of the multi-domain stack molecule has the sequence set forth in any of SEQ ID NOS: 1716, 1717, 1718, 1719, 1720 or 1721 or a sequence of amino acids that has at least 85%, 86%, 87%, 88%, 89%, 90%, 91%, 92%, 93%, 94%, 95%, 96%, 97%, 98%, 99% or more sequence identity to any of SEQ ID NOS: 1716, 1717, 1718, 1719, 1720 or 1721 and contains the one more amino acid modifications in the variant PD-L1 and/or CD155 IgSF domain. In some embodiments, the resulting multi-domain stack molecules bind to both TIGIT and PD-1. In some aspects, the binding to TIGIT is to the same or similar degree or, in some cases, is increased, compared to the binding to TIGIT of the corresponding IgSF domain of unmodified or wild-type PD-L1 or CD155. In some aspects, the binding to PD-1 is to the same or similar degree, or, in some cases, is increased, compared to the binding to PD-1 of the corresponding IgSF domain of unmodified or wild-type PD-L1. In some embodiments, the binding to TIGIT or PD-1 is at least 30%, 40%, 50%, 60%, 70%, 80%, 90%, or more of the binding to TIGIT or PD-1 of the non-stacked form of the variant PD-L1 IgSF-Fc. In some embodiments, the binding to TIGIT is at least 30%, 40%, 50%, 60%, 70%, 80%, 90% or more of the binding to TIGIT of the non-stacked form of the variant CD155 IgSF-Fc. In some embodiments, the resulting multi-domain stack molecule increases T cell immune responses compared to the non-stack variant PD-L1 IgSF-Fc and/or variant CD155-IgSF-Fc, such as determined in a reporter assay. In some embodiments, the increase is greater than 1.2-fold, 1.3-fold, 1.4-fold, 1.5-fold, 2.0-fold, 3.0-fold, 4.0-fold, 5.0-fold or more.

[0289] There is provided herein a homodimeric multi-domain stack molecule produced from a stack immunomodulatory Fc fusion polypeptide containing an IgSF domain, e.g. IgV domain, of a variant PD-L1 polypeptide, a second IgSF domain, e.g. IgV, of a variant CD155 polypeptide and a third IgSF domain, e.g. IgV, of a variant CD112 polypeptide. In some embodiments, the first and second immunomodulatory Fc fusion polypeptide of the multi-domain stack molecule has the sequence set forth in any of SEQ ID NOS: 1722, 1723 and 1724 or a sequence of amino acids that has at least 85%, 86%, 87%, 88%, 89%, 90%, 91%, 92%, 93%, 94%, 95%, 96%, 97%, 98%, 99% or more sequence identity to any of SEQ ID NOS: 1722, 1723 and 1724 and contains the one more amino acid modifications in the variant CD112, CD155 and/or PD-L1 IgSF domain. In some embodiments, the resulting multi-domain stack molecules bind to both TIGIT, CD112R and PD-1. In some aspects, the binding to TIGIT is to the same or similar degree or, in some cases, is increased, compared to the binding to TIGIT of the corresponding IgSF domain of unmodified or wild-type CD112 or CD155. In some aspects, the binding to CD112R is to the same or similar degree, or, in some cases, is increased, compared to the binding to CD112R of the corresponding IgSF domain of unmodified or wild-type CD112. In some aspects, the binding to PD-1 is to the same or similar degree, or, in some cases, is increased, compared to the binding to PD-1 of the corresponding IgSF domain of unmodified or wild-type PD-L1. In some embodiments, the binding to TIGIT or CD112R is at least 30%, 40%, 50%, 60%, 70%, 80%, 90%, or more of the binding to TIGIT or CD112R of the non-stacked form of the variant CD112 IgSF-Fc. In some embodiments, the binding to TIGIT is at least 30%, 40%, 50%, 60%, 70%, 80%, 90% or more of the binding to TIGIT of the non-stacked form of the variant CD155 IgSF-Fc. In some embodiments, the binding to PD-1 is at least 30%, 40%, 50%, 60%, 70%, 80%, 90% or more of the binding to PD-1 of the non-stacked form of the variant PD-1 IgSF-Fc. In some embodiments, the resulting multi-domain stack molecule increases T cell immune responses compared to the non-stack variant CD112 IgSF-Fc, variant CD155-IgSF-Fc and/or variant PD-L1-IgSF-Fc, such as determined in a reporter assay. In some embodiments, the increase is greater than 1.2-fold, 1.3-fold, 1.4-fold, 1.5-fold, 2.0-fold, 3.0-fold, 4.0-fold, 5.0-fold or more.

[0290] C. Conjugates and Fusions of Variant Polypeptides and Immunomodulatory Proteins

[0291] In some embodiments, the variant polypeptides provided herein, which are immunomodulatory proteins comprising variants of an Ig domain of the IgSF family (vIgD), can be conjugated with or fused with a moiety, such as an effector moiety, such as another protein, directly or indirectly, to form a conjugate (“IgSF conjugate”). In some embodiments, the attachment can be covalent or non-covalent, e.g., via a biotin-streptavidin non-covalent interaction. In some embodiments, the moiety can be a targeting moiety, a small molecule drug (non-polypeptide drug of less than 500 daltons molar mass), a toxin, a cytostatic agent, a cytotoxic agent, an immunosuppressive agent, a radioactive agent suitable for diagnostic purposes, a radioactive metal ion for therapeutic purposes, a prodrug-activating enzyme, an agent that increases biological half-life, or a diagnostic or detectable agent.

[0292] In some embodiments the effector moiety is a therapeutic agent, such as a cancer therapeutic agent, which is either cytotoxic, cytostatic or otherwise provides some therapeutic benefit. In some embodiments, the effector moiety is a targeting moiety or agent, such as an agent that targets a cell surface antigen, e.g., an antigen on the surface of a tumor cell. In some embodiments, the effector moiety is a label, which can generate a detectable signal, either directly or indirectly. In some embodiments, the effector moiety is a toxin. In some embodiments, the effector moiety is a protein, peptide, nucleic acid, small molecule or nanoparticle.

[0293] In some embodiments, 1, 2, 3, 4, 5 or more effector moieties, which can be the same or different, are conjugated, linked or fused to the variant polypeptide or protein to form an IgSF conjugate. In some embodiments, such effector moieties can be attached to the variant polypeptide or immunomodulatory protein using various molecular biological or chemical conjugation and linkage methods known in the art and described below. In some embodiments, linkers such as peptide linkers, cleavable linkers, non-cleavable linkers or linkers that aid in the conjugation reaction, can be used to link or conjugate the effector moieties to the variant polypeptide or immunomodulatory protein.

[0294] In some embodiments, the IgSF conjugate comprises the following components: (protein or polypeptide), (L)_{q} and (effector moiety)ₘ, wherein the protein or polypeptide is any of the described variant polypeptides or immunomodulatory proteins capable of binding one or more cognate counter structure ligands as described; L is a linker for linking the protein or polypeptide to the moiety; m is at least 1; q is 0 or more; and the resulting IgSF conjugate binds to the one or more counter structure ligands. In particular embodiments, m is 1 to 4 and q is 0 to 8.

[0295] In some embodiments, there is provided an IgSF conjugate comprising a variant polypeptide or immunomodulatory protein provided herein conjugated with a targeting agent that binds to a cell surface molecule, for example, for targeted delivery of the variant polypeptide or immunomodulatory protein to a specific cell. In some embodiments, the targeting agent is a molecule(s) that has the ability to localize and bind to a molecule present on a normal cell/tissue and/or tumor cell/tumor in a subject. In other words, IgSF conjugates comprising a targeting agent can bind to a ligand (directly or indirectly), which is present on a cell, such as a tumor cell. The targeting agents of the invention contemplated for use include antibodies, polypeptides, peptides, aptamers, other ligands, or any combination thereof, that can bind a component of a target cell or molecule.

[0296] In some embodiments, the targeting agent binds a tumor cell(s) or can bind in the vicinity of a tumor cell(s) (e.g., tumor vasculature or tumor microenvironment) following administration to the subject. The targeting agent may bind to a receptor or ligand on the surface of the cancer cell. In another aspect of the invention, a targeting agent is selected which is specific for a noncancerous cells or tissue. For example, a targeting agent can be specific for a molecule present normally on a particular cell or tissue. Furthermore, in some embodiments, the same molecule can be present on normal and cancer cells. Various cellular components and molecules are known. For example, if a targeting agent is specific for EGFR, the resulting IgSF conjugate can target cancer cells expressing EGFR as well as normal skin epidermal cells expressing EGFR. Therefore, in some embodiments, an IgSF conjugate of the invention can operate by two separate mechanisms (targeting cancer and non-cancer cells).

[0297] In various aspects of the invention disclosed herein an IgSF conjugate of the invention comprises a targeting agent which can bind/target a cellular component, such as a tumor antigen, a bacterial antigen, a viral antigen, a mycoplasm antigen, a fungal antigen, a prion antigen, an antigen from a parasite. In some aspects, a cellular component, antigen or molecule can each be used to mean, a desired target for a targeting agent. For example, in various embodiments, a targeting agent is specific for or binds to a component, which includes but is not limited to, epidermal growth factor receptor (EGFR, ErbB-1, HER1), ErbB-2 (HER2/neu), ErbB-3/HER3, ErbB-4/HER4, EGFR ligand family; insulin-like growth factor receptor (IGFR) family, IGF-binding proteins (IGFBPs), IGFR ligand family; platelet derived growth factor receptor (PDGFR) family, PDGFR ligand family; fibroblast growth factor receptor (FGFR) family, FGFR ligand family, vascular endothelial growth factor receptor (VEGFR) family, VEGF family; HGF receptor family; TRK receptor family; ephrin (EPH) receptor family; AXL receptor family; leukocyte tyrosine kinase (LTK) receptor family; TIE receptor family, angiopoietin 1,2; receptor tyrosine kinase-like orphan receptor (ROR) receptor family, e.g. ROR1; CD171 (L1CAM); B7-H6 (NCR3LG1); PD-L1, tumor glycosylation antigen, e.g. sTn or Tn, such as sTn Ag of MUC1; LHR (LHCGR); phosphatidylserine, discoidin domain receptor (DDR) family; RET receptor family; KLG receptor family; RYK receptor family; MuSK receptor family; Transforming growth factor-α (TGF-α) receptors, TGF-β; Cytokine receptors, Class I (hematopoietin family) and Class II (interferon/IL-10 family) receptors, tumor necrosis factor (TNF) receptor superfamily (TNFRSF), death receptor family; cancer-testis (CT) antigens, lineage-specific antigens, differentiation antigens, alpha-actinin-4, ARTC1, breakpoint cluster region-Abelson (Bcr-abl) fusion products, B-RAF, caspase-5 (CASP-5), caspase-8 (CASP-8), β-catenin (CTNNB1), cell division cycle 27 (CDC27), cyclin-dependent kinase 4 (CDK4), CDKN2A, COA-I, dek-can fusion protein, EFTUD-2, Elongation factor 2 (ELF2), Ets variant gene 6/acute myeloid leukemia 1 gene ETS (ETC6-AML1) fusion protein, fibronectin (FN), e.g. the extradomain A (EDA) of fibronectin, GPNMB, low density lipid receptor/GDP-L fucose: β-D-galactose 2-α-L-fucosyltransferase (LDLR/FUT) fusion protein, HLA-A2. arginine to isoleucine exchange at residue 170 of the α-helix of the α2-domain in the HLA-A2gene (HLA-A*201-R170I), HLA-Al 1, heat shock protein 70-2 mutated (HSP70-2M), K1AA0205, MART2, melanoma ubiquitous mutated 1, 2, 3 (MUM-I, 2, 3), prostatic acid phosphatase (PAP), neo-PAP, Myosin class I, NFYC, OGT, OS-9, pml-RARα fusion protein, PRDX5, PTPRK, K-ras (KRAS2), N-ras (NRAS), HRAS, RBAF600, SIRT2, SNRPD1, SYT-SSX1 or -SSX2 fusion protein, Triosephosphate Isomerase, BAGE, BAGK-1, BAGE-2,3,4,5, GAGE-1,2,3,4,5,6,7,8, GnT-V (aberrant N-acetyl glucosaminyl transferase V, MGAT5), HERV-K-MEL, KK-LC, KM-HN-I, LAGE, LAGE-I, CTL-recognized antigen on melanoma (CAMEL), MAGE-A1 (MAGE-I), MAGE-A2, MAGE-A3, MAGE-A4, MAGE-A5, MAGE-A6, MAGE-A8, MAGE-A9, MAGE-A1O, MAGE-AI1, MAGE-A12, MAGE-3, MAGE-B1, MAGE-B2, MAGE-B5, MAGE-B6, MAGE-C1, MAGE-C2, mucin 1 (MUC1), MART-1/Melan-A (MLANA), gp1OO, gp1OO/Pmell7 (SILV), tyrosinase (TYR), TRP-I, HAGE, NA-88, NY-ESO-I, NY-ESO-1/LAGE-2, SAGE, Spl7, SSX-1,2,3,4, TRP2-INT2, carcino-embryonic antigen (CEA), Kallikrein 4, mammaglobin-A, OAl, prostate specific antigen (PSA), TRP-1/gp75, TRP-2, adipophilin, interferon inducible protein absent in melanoma 2 (AIM-2), BING-4, CPSF, cyclin D1, epithelial cell adhesion molecule (Ep-CAM), EphA3, fibroblast growth factor-5 (FGF-5), glycoprotein 250 (gp250), EGFR (ERBB1), HER-2/neu (ERBB2), interleukin 13 receptor α2 chain (IL13Rα2), IL-6 receptor, intestinal carboxyl esterase (iCE), alpha-feto protein (AFP), M-CSF, mdm-2, MUC1, p53 (TP53), PBF, PRAME, PSMA, RAGE-I, RNF43, RU2AS, SOX1O, STEAP1, survivin (BIRC5), human telomerase reverse transcriptase (hTERT), telomerase, Wilms' tumor gene (WT1), SYCP1, BRDT, SPANX, XAGE, ADAM2, PAGE-5, LIP1, CTAGE-I, CSAGE, MMA1, CAGE, BORIS, HOM-TES-85, AF15q14, HCA661, LDHC, MORC, SGY-I, SPO1 1, TPX1, NY-SAR-35, FTHL17, NXF2, TDRD1, TEX15, FATE, TPTE, immunoglobulin idiotypes, Bence-Jones protein, estrogen receptors (ER), androgen receptors (AR), CD40, CD30, CD20, CD 19, CD33, cancer antigen 72-4 (CA 72-4), cancer antigen 15-3 (CA 15-3), cancer antigen 27-29 (CA 27-29), cancer antigen 125 (CA 125), cancer antigen 19-9 (CA 19-9), β-human chorionic gonadotropin, β-2 microglobulin, squamous cell carcinoma antigen, neuron-specific enolase, heat shock protein gp96, GM2, sargramostim, CTLA-4, 707 alanine proline (707-AP), adenocarcinoma antigen recognized by T cells 4 (ART-4), carcinoembryogenic antigen peptide-1 (CAP-I), calcium-activated chloride channel-2 (CLCA2), cyclophilin B (Cyp-B), human signet ring tumor-2 (HST-2), Human papilloma virus (HPV) proteins (HPV-E6, HPV-E7, major or minor capsid antigens, others), Epstein-Barr virus (EBV) proteins (EBV latent membrane proteins—LMP1, LMP2; others), Hepatitis B or C virus proteins, and HIV proteins.

[0298] In some embodiments, an IgSF conjugate, through its targeting agent, will bind a cellular component of a tumor cell, tumor vasculature or tumor microenvironment, thereby promoting killing of targeted cells via modulation of the immune response, (e.g., by activation of co-stimulatory molecules or inhibition of negative regulatory molecules of immune cell activation), inhibition of survival signals (e.g., growth factor or cytokine or hormone receptor antagonists), activation of death signals, and/or immune-mediated cytotoxicity, such as through antibody dependent cellular cytotoxicity. Such IgSF conjugates can function through several mechanisms to prevent, reduce or eliminate tumor cells, such as to facilitate delivery of conjugated effector moieties to the tumor target, such as through receptor-mediated endocytosis of the IgSF conjugate; or such conjugates can recruit, bind, and/or activate immune cells (e.g. NK cells, monocytes/macrophages, dendritic cells, T cells, B cells). Moreover, in some instances one or more of the foregoing pathways may operate upon administration of one or more IgSF conjugates of the invention.

[0299] In some embodiments, an IgSF conjugate, through its targeting agent, will be localized to, such as bind to, a cellular component of a tumor cell, tumor vasculature or tumor microenvironment, thereby modulating cells of the immune response in the vicinity of the tumor. In some embodiments, the targeting agent facilitates delivery of the conjugated IgSF (e.g. vIgD) to the tumor target, such as to interact with its cognate binding partner to alter signaling of immune cells (e.g. NK cells, monocytes/macrophages, dendritic cells, T cells, B cells) bearing the cognate binding partner. In some embodiments, localized delivery mediates an antagonizing or blocking activity of the PD-1 inhibitory receptor. In some embodiments, localized delivery agonizes the PD-1 inhibitory receptor, which, in some cases, can occur where there is proximal clustering of an activating receptor.

[0300] In some embodiments, the targeting agent is an immunoglobulin. As used herein, the term “immunoglobulin” includes natural or artificial mono- or polyvalent antibodies including, but not limited to, polyclonal, monoclonal, multispecific, human, humanized or chimeric antibodies, single chain antibodies, Fab fragments, F(ab′) fragments, fragments produced by a Fab expression library, single chain Fv (scFv); anti-idiotypic (anti-Id) antibodies (including, e.g., anti-Id antibodies to antibodies of the invention), and epitope-binding fragments of any of the above. The term “antibody,” as used herein, refers to immunoglobulin molecules and immunologically active portions of immunoglobulin molecules, e.g., molecules that contain an antigen binding site that immunospecifically binds an antigen. The immunoglobulin molecules of the invention can be of any type (e.g., IgG, IgE, IgM, IgD, IgA, and IgY), class (e.g., IgG1, IgG2, IgG3, IgG4, IgA1, and IgA2) or subclass of immunoglobulin molecule.

[0301] In some embodiments, an IgSF conjugate, through its antibody targeting moiety, will bind a cellular component of a tumor cell, tumor vasculature or tumor microenvironment, thereby promoting apoptosis of targeted cells via modulation of the immune response, (e.g., by activation of co-stimulatory molecules or inhibition of negative regulatory molecules of immune cell activation), inhibition of survival signals (e.g., growth factor or cytokine or hormone receptor antagonists), activation of death signals, and/or immune-mediated cytotoxicity, such as through antibody dependent cellular cytotoxicity. Such IgSF conjugates can function through several mechanisms to prevent, reduce or eliminate tumor cells, such as to facilitate delivery of conjugated effector moieties to the tumor target, such as through receptor-mediated endocytosis of the IgSF conjugate; or such conjugates can recruit, bind, and/or activate immune cells (e.g. NK cells, monocytes/macrophages, dendritic cells, T cells, B cells).

[0302] In some embodiments, an IgSF conjugate, through its antibody targeting moiety, will bind a cellular component of a tumor cell, tumor vasculature or tumor microenvironment, thereby modulating the immune response (e.g., by activation of co-stimulatory molecules or inhibition of negative regulatory molecules of immune cell activation). In some embodiments, such conjugates can recognize, bind, and/or modulate (e.g. inhibit or activate) immune cells (e.g. NK cells, monocytes/macrophages, dendritic cells, T cells, B cells).

[0303] Antibody targeting moieties of the invention include antibody fragments that include, but are not limited to, Fab, Fab′ and F(ab′)2, Fd, single-chain Fvs (scFv), single-chain antibodies, disulfide-linked Fvs (sdFv) and fragments comprising either a VL or VH domain. Antigen-binding antibody fragments, including single-chain antibodies, may comprise the variable region(s) alone or in combination with the entirety or a portion of the following: hinge region, CH1, CH2, and CH3 domains. Also included in the invention are antigen-binding fragments also comprising any combination of variable region(s) with a hinge region, CH1, CH2, and CH3 domains. Also included in the invention are Fc fragments, antigen-Fc fusion proteins, and Fc-targeting moiety conjugates or fusion products (Fc-peptide, Fc-aptamer). The antibody targeting moieties of the invention may be from any animal origin including birds and mammals. In one aspect, the antibody targeting moieties are human, murine (e.g., mouse and rat), donkey, sheep, rabbit, goat, guinea pig, camel, horse, or chicken. Further, such antibodies may be humanized versions of animal antibodies. The antibody targeting moieties of the invention may be monospecific, bispecific, trispecific, or of greater multispecificity.

[0304] In various embodiments, an antibody/targeting moiety recruits, binds, and/or activates immune cells (e.g. NK cells, monocytes/macrophages, dendritic cells) via interactions between Fc (in antibodies) and Fc receptors (on immune cells) and via the conjugated variant polypeptides or immunomodulatory proteins provided herein. In some embodiments, an antibody/targeting moiety recognizes or binds a tumor agent via and localizes to the tumor cell the conjugated variant polypeptides or immunomodulatory proteins provided herein to facilitate modulation of immune cells in the vicinity of the tumor.

[0305] Examples of antibodies which can be incorporated into IgSF conjugates include but are not limited to antibodies such as Cetuximab (IMC-C225; Erbitux®), Trastuzumab (Herceptin®), Rituximab (Rituxan®; MabThera®), Bevacizumab (Avastin®), Alemtuzumab (Campath®; Campath-1H®; Mabcampath®), Panitumumab (ABX-EGF; Vectibix®), Ranibizumab (Lucentis®), Ibritumomab, Ibritumomab tiuxetan, (Zevalin®), Tositumomab, Iodine I 131 Tositumomab (BEXXAR®), Catumaxomab (Removab®), Gemtuzumab, Gemtuzumab ozogamicine (Mylotarg®), Abatacept (CTLA4-Ig; Orencia®), Belatacept (L104EA29YIg; LEA29Y; LEA), Ipilimumab (MDX-010; MDX-101), Tremelimumab (ticilimumab; CP-675,206), PRS-010, PRS-050, Aflibercept (VEGF Trap, AVE005), Volociximab (M200), F200, MORAb-009, SS1P (CAT-5001), Cixutumumab (IMC-A12), Matuzumab (EMD72000), Nimotuzumab (h-R3), Zalutumumab (HuMax-EGFR), Necitumumab IMC-11F8, mAb806/ch806, Sym004, mAb-425, Panorex @ (17-1A) (murine monoclonal antibody); Panorex @ (17-1A) (chimeric murine monoclonal antibody); IDEC-Y2B8 (murine, anti-CD2O MAb); BEC2 (anti-idiotypic MAb, mimics the GD epitope) (with BCG); Oncolym (Lym-1 monoclonal antibody); SMART MI95 Ab, humanized 13′ I LYM-I (Oncolym), Ovarex (B43.13, anti-idiotypic mouse MAb); MDX-210 (humanized anti-HER-2 bispecific antibody); 3622W94 MAb that binds to EGP40 (17-1A) pancarcinoma antigen on adenocarcinomas; Anti-VEGF, Zenapax (SMART Anti-Tac (IL-2 receptor); SMART MI95 Ab, humanized Ab, humanized); MDX-210 (humanized anti-HER-2 bispecific antibody); MDX-447 (humanized anti-EGF receptor bispecific antibody); NovoMAb-G2 (pancarcinoma specific Ab); TNT (chimeric MAb to histone antigens); TNT (chimeric MAb to histone antigens); Gliomab-H (Monoclons—Humanized Abs); GNI-250 Mab; EMD-72000 (chimeric-EGF antagonist); LymphoCide (humanized LL2 antibody); and MDX-260 bispecific, targets GD-2, ANA Ab, SMART ID1O Ab, SMART ABL 364 Ab or ImmuRAIT-CEA. As illustrated by the forgoing list, it is conventional to make antibodies to a particular target epitope.

[0306] In some embodiments, the antibody targeting moiety is a full length antibody, or antigen-binding fragment thereof, containing an Fc domain. In some embodiments, the variant polypeptide or immunomodulatory protein is conjugated to the Fc portion of the antibody targeting moiety, such as by conjugation to the N-terminus of the Fc portion of the antibody.

[0307] In some embodiments, the vIgD is linked, directly or indirectly, to the N- or C-terminus of the light and/or heavy chain of the antibody. In some embodiments, linkage can be via a peptide linker, such as any described above. Various configurations can be constructed. FIG. 7A-7C depict exemplary configurations. In some embodiments, the antibody conjugate can be produced by co-expression of the heavy and light chain of the antibody in a cell.

[0308] In one aspect of the invention, the targeting agent is an aptamer molecule. For example, in some embodiments, the aptamer is comprised of nucleic acids that function as a targeting agent. In various embodiments, an IgSF conjugate of the invention comprises an aptamer that is specific for a molecule on a tumor cell, tumor vasculature, and/or a tumor microenvironment. In some embodiments, the aptamer itself can comprise a biologically active sequence, in addition to the targeting module (sequence), wherein the biologically active sequence can induce an immune response to the target cell. In other words, such an aptamer molecule is a dual use agent. In some embodiments, an IgSF conjugate of the invention comprises conjugation of an aptamer to an antibody, wherein the aptamer and the antibody are specific for binding to separate molecules on a tumor cell, tumor vasculature, tumor microenvironment, and/or immune cells.

[0309] The term “aptamer” includes DNA, RNA or peptides that are selected based on specific binding properties to a particular molecule. For example, an aptamer(s) can be selected for binding a particular gene or gene product in a tumor cell, tumor vasculature, tumor microenvironment, and/or an immune cell, as disclosed herein, where selection is made by methods known in the art and familiar to one of skill in the art.

[0310] In some aspects of the invention the targeting agent is a peptide. For example, the variant polypeptides or immunomodulatory proteins provided herein can be conjugated to a peptide which can bind with a component of a cancer or tumor cells. Therefore, such IgSF conjugates of the invention comprise peptide targeting agents which binds to a cellular component of a tumor cell, tumor vasculature, and/or a component of a tumor microenvironment. In some embodiments, targeting agent peptides can be an antagonist or agonist of an integrin. Integrins, which comprise an alpha and a beta subunit, include numerous types well known to a skilled artisan.

[0311] In one embodiment, the targeting agent is Vvβ3. Integrin Vvβ3 is expressed on a variety of cells and has been shown to mediate several biologically relevant processes, including adhesion of osteoclasts to bone matrix, migration of vascular smooth muscle cells, and angiogenesis. Suitable targeting molecules for integrins include RGD peptides or peptidomimetics as well as non-RGD peptides or peptidomimetics (see, e.g., U.S. Pat. Nos. 5,767,071 and 5,780,426) for other integrins such as V4.βi (VLA-4), V4-P7 (see, e.g., U.S. Pat. No. 6,365,619; Chang et al, Bioorganic & Medicinal Chem Lett, 12:159-163 (2002); Lin et al., Bioorganic & Medicinal Chem Lett, 12:133-136 (2002)), and the like.

[0312] In some embodiments, there is provided an IgSF conjugate comprising a variant polypeptide or immunomodulatory protein provided herein conjugated with a therapeutic agent. In some embodiments, the therapeutic agent includes, for example, daunomycin, doxorubicin, methotrexate, and vindesine (Rowland et al., Cancer Immunol. Immunother. 21:183-187, 1986). In some embodiments, the therapeutic agent has an intracellular activity. In some embodiments, the IgSF conjugate is internalized and the therapeutic agent is a cytotoxin that blocks the protein synthesis of the cell, therein leading to cell death. In some embodiments, the therapeutic agent is a cytotoxin comprising a polypeptide having ribosome-inactivating activity including, for example, gelonin, bouganin, saporin, ricin, ricin A chain, bryodin, diphtheria toxin, restrictocin, Pseudomonas exotoxin A and variants thereof. In some embodiments, where the therapeutic agent is a cytotoxin comprising a polypeptide having a ribosome-inactivating activity, the IgSF conjugate must be internalized upon binding to the target cell in order for the protein to be cytotoxic to the cells.

[0313] In some embodiments, there is provided an IgSF conjugate comprising a variant polypeptide or immunomodulatory protein provided herein conjugated with a toxin. In some embodiments, the toxin includes, for example, bacterial toxins such as diphtheria toxin, plant toxins such as ricin, small molecule toxins such as geldanamycin (Mandler et al., J. Nat. Cancer Inst. 92(19):1573-1581 (2000); Mandler et al., Bioorganic & Med. Chem. Letters 10:1025-1028 (2000); Mandler et al., Bioconjugate Chem. 13:786-791 (2002)), maytansinoids (EP 1391213; Liu et al., Proc. Natl. Acad. Sci. USA 93:8618-8623 (1996)), and calicheamicin (Lode et al., Cancer Res. 58:2928 (1998); Hinman et al., Cancer Res. 53:3336-3342 (1993)). The toxins may exert their cytotoxic and cytostatic effects by mechanisms including tubulin binding, DNA binding, or topoisomerase inhibition.

[0314] In some embodiments, there is provided an IgSF conjugate comprising a variant polypeptide or immunomodulatory protein provided herein conjugated with a label, which can generate a detectable signal, indirectly or directly. These IgSF conjugates can be used for research or diagnostic applications, such as for the in vivo detection of cancer. The label is preferably capable of producing, either directly or indirectly, a detectable signal. For example, the label may be radio-opaque or a radioisotope, such as 3H, 14C, 32P, 35S, 123I, 125I, 131I; a fluorescent (fluorophore) or chemiluminescent (chromophore) compound, such as fluorescein isothiocyanate, rhodamine or luciferin; an enzyme, such as alkaline phosphatase, β-galactosidase or horseradish peroxidase; an imaging agent; or a metal ion. In some embodiments, the label is a radioactive atom for scintigraphic studies, for example 99Tc or 123I, or a spin label for nuclear magnetic resonance (NMR) imaging (also known as magnetic resonance imaging, MRI), such as zirconium-89, iodine-123, iodine-131, indium-111, fluorine-19, carbon-13, nitrogen-15, oxygen-17, gadolinium, manganese or iron. Zirconium-89 may be complexed to various metal chelating agents and conjugated to antibodies, e.g., for PET imaging (WO 2011/056983). In some embodiments, the IgSF conjugate is detectable indirectly. For example, a secondary antibody that is specific for the IgSF conjugate and contains a detectable label can be used to detect the IgSF conjugate.

[0315] The IgSF conjugates may be prepared using any methods known in the art. See, e.g., WO 2009/067800, WO 2011/133886, and U.S. Patent Application Publication No. 2014322129, incorporated by reference herein in their entirety.

[0316] The variant polypeptides or immunomodulatory proteins of an IgSF conjugate may be “attached to” the effector moiety by any means by which the variant polypeptides or immunomodulatory proteins can be associated with, or linked to, the effector moiety. For example, the variant polypeptides or immunomodulatory proteins of an IgSF conjugate may be attached to the effector moiety by chemical or recombinant means. Chemical means for preparing fusions or conjugates are known in the art and can be used to prepare the IgSF conjugate. The method used to conjugate the variant polypeptides or immunomodulatory proteins and effector moiety must be capable of joining the variant polypeptides or immunomodulatory proteins with the effector moiety without interfering with the ability of the variant polypeptides or immunomodulatory proteins to bind to their one or more counter structure ligands.

[0317] The variant polypeptides or immunomodulatory proteins of an IgSF conjugate may be linked indirectly to the effector moiety. For example, the variant polypeptides or immunomodulatory proteins of an IgSF conjugate may be directly linked to a liposome containing the effector moiety of one of several types. The effector moiety(s) and/or the variant polypeptides or immunomodulatory proteins may also be bound to a solid surface.

[0318] In some embodiments, the variant polypeptides or immunomodulatory proteins of an IgSF conjugate and the effector moiety are both proteins and can be conjugated using techniques well known in the art. There are several hundred crosslinkers available that can conjugate two proteins. (See for example “Chemistry of Protein Conjugation and Crosslinking,” 1991, Shans Wong, CRC Press, Ann Arbor). The crosslinker is generally chosen based on the reactive functional groups available or inserted on the variant polypeptides or immunomodulatory proteins and/or effector moiety. In addition, if there are no reactive groups, a photoactivatible crosslinker can be used. In certain instances, it may be desirable to include a spacer between the variant polypeptides or immunomodulatory proteins and the effector moiety. Crosslinking agents known to the art include the homobifunctional agents: glutaraldehyde, dimethyladipimidate and Bis(diazobenzidine) and the heterobifunctional agents: m Maleimidobenzoyl-N-Hydroxysuccinimide and Sulfo-m Maleimidobenzoyl-N-Hydroxysuccinimide.

[0319] In some embodiments, the variant polypeptides or immunomodulatory proteins of an IgSF conjugate may be engineered with specific residues for chemical attachment of the effector moiety. Specific residues used for chemical attachment of molecule known to the art include lysine and cysteine. The crosslinker is chosen based on the reactive functional groups inserted on the variant polypeptides or immunomodulatory proteins, and available on the effector moiety.

[0320] An IgSF conjugate may also be prepared using recombinant DNA techniques. In such a case a DNA sequence encoding the variant polypeptides or immunomodulatory proteins is fused to a DNA sequence encoding the effector moiety, resulting in a chimeric DNA molecule. The chimeric DNA sequence is transfected into a host cell that expresses the fusion protein. The fusion protein can be recovered from the cell culture and purified using techniques known in the art.

[0321] Examples of attaching an effector moiety, which is a label, to the variant polypeptides or immunomodulatory proteins include the methods described in Hunter, et al., Nature 144:945 (1962); David, et al., Biochemistry 13:1014 (1974); Pain, et al., J. Immunol. Meth. 40:219 (1981); Nygren, J. Histochem. and Cytochem. 30:407 (1982); Wensel and Meares, Radioimmunoimaging And Radioimmunotherapy, Elsevier, N.Y. (1983); and Colcher et al., “Use Of Monoclonal Antibodies As Radiopharmaceuticals For The Localization Of Human Carcinoma Xenografts In Athymic Mice”, Meth. Enzymol., 121:802-16 (1986).

[0322] The radio- or other labels may be incorporated in the conjugate in known ways. For example, the peptide may be biosynthesized or may be synthesized by chemical amino acid synthesis using suitable amino acid precursors involving, for example, fluorine-19 in place of hydrogen. Labels such as 99Tc or 123I, 186Re, 188Re and 111In can be attached via a cysteine residue in the peptide. Yttrium-90 can be attached via a lysine residue. The IODOGEN method (Fraker et al., Biochem. Biophys. Res. Commun. 80:49-57 (1978)) can be used to incorporate iodine-123. “Monoclonal Antibodies in Immunoscintigraphy” (Chatal, CRC Press 1989) describes other methods in detail.

[0323] Conjugates of the variant polypeptides or immunomodulatory proteins and a cytotoxic agent may be made using a variety of bifunctional protein coupling agents such as N-succinimidyl-3-(2-pyridyldithio) propionate (SPDP), succinimidyl-4-(N-maleimidomethyl) cyclohexane-1-carboxylate (SMCC), iminothiolane (IT), bifunctional derivatives of imidoesters (such as dimethyl adipimidate HCI), active esters (such as disuccinimidyl suberate), aldehydes (such as glutaraldehyde), bis-azido compounds (such as bis (p-azidobenzoyl) hexanediamine), bis-diazonium derivatives (such as bis-(p-diazoniumbenzoyl)-ethylenediamine), diisocyanates (such as toluene 2,6-diisocyanate), and bis-active fluorine compounds (such as 1,5-difluoro-2,4-dinitrobenzene). For example, a ricin immunotoxin can be prepared as described in Vitetta et al., Science 238:1098 (1987). Carbon-14-labeled 1-p-isothiocyanatobenzyl-3-methyldiethylenetriaminepentaacetic acid (MX-DTPA) is an exemplary chelating agent for conjugation of radionucleotide to the antibody. See, e.g., WO94/11026. The linker may be a “cleavable linker” facilitating release of the cytotoxic drug in the cell. For example, an acid-labile linker, peptidase-sensitive linker, photolabile linker, dimethyl linker or disulfide-containing linker (Chari et al., Cancer Research 52:127-131 (1992); U.S. Pat. No. 5,208,020) may be used.

[0324] The IgSF conjugates of the invention expressly contemplate, but are not limited to, drug conjugates prepared with cross-linker reagents: BMPS, EMCS, GMBS, HBVS, LC-SMCC, MBS, MPBH, SBAP, SIA, SIAB, SMCC, SMPB, SMPH, sulfo-EMCS, sulfo-GMBS, sulfo-KMUS, sulfo-MBS, sulfo-SIAB, sulfo-SMCC, and sulfo-SMPB, and SVSB (succinimidyl-(4-vinylsulfone) benzoate) which are commercially available (e.g., from Pierce Biotechnology, Inc., Rockford, Ill., U.S.A). See pages 467-498, 2003-2004 Applications Handbook and Catalog.

[0325] D. Transmembrane and Secretable Immunomodulatory Proteins and Engineered Cells

[0326] Provided herein are engineered cells which express the immunomodulatory variant PD-L1 polypeptides (alternatively, “engineered cells”). In some embodiments, the expressed immunomodulatory variant PD-L1 polypeptide is a transmembrane protein and is surface expressed. In some embodiments, the expressed immunomodulatory variant PD-L1 polypeptide is expressed and secreted from the cell.

[0327] 1. Transmembrane Immunomodulatory Proteins

[0328] In some embodiments, an immunomodulatory polypeptide comprising a variant PD-L1 can be a membrane bound protein. As described in more detail below, the immunomodulatory polypeptide can be a transmembrane immunomodulatory polypeptide comprising a variant PD-L1 in which is contained: an ectodomain containing at least one affinity modified IgSF domain (IgV or IgC), a transmembrane domain and, optionally, a cytoplasmic domain. In some embodiments, the transmembrane immunomodulatory protein can be expressed on the surface of an immune cell, such as a mammalian cell, including on the surface of a lymphocyte (e.g. T cell or NK cell) or antigen presenting cell. In some embodiments, the transmembrane immunomodulatory protein is expressed on the surface of a mammalian T-cell, including such T-cells as: a T helper cell, a cytotoxic T-cell (alternatively, cytotoxic T lymphocyte or CTL), a natural killer T-cell, a regulatory T-cell, a memory T-cell, or a gamma delta T-cell. In some embodiments, the mammalian cell is an antigen presenting cell (APC). Typically, but not exclusively, the ectodomain (alternatively, “extracellular domain”) of comprises the one or more amino acid variations (e.g. amino acid substitutions) of the variant PD-L1 of the invention. Thus, for example, in some embodiments a transmembrane protein will comprise an ectodomain that comprises one or more amino acid substitutions of a variant PD-L1 of the invention.

[0329] In some embodiments, the engineered cells express a variant PD-L1 polypeptides are transmembrane immunomodulatory polypeptides (TIPs) that can be a membrane protein such as a transmembrane protein. In typical embodiments, the ectodomain of a membrane protein comprises an extracellular domain or IgSF domain thereof of a variant PD-L1 provided herein in which is contained one or more amino acid substitutions in at least one IgSF domain as described. The transmembrane immunomodulatory proteins provided herein further contain a transmembrane domain linked to the ectodomain. In some embodiments, the transmembrane domain results in an encoded protein for cell surface expression on a cell. In some embodiments, the transmembrane domain is linked directly to the ectodomain. In some embodiments, the transmembrane domain is linked indirectly to the ectodomain via one or more linkers or spacers. In some embodiments, the transmembrane domain contains predominantly hydrophobic amino acid residues, such as leucine and valine.

[0330] In some embodiments, a full length transmembrane anchor domain can be used to ensure that the TIPs will be expressed on the surface of the engineered cell, such as engineered T cell. Conveniently, this could be from a particular native protein that is being affinity modified (e.g. PD-L1 or other native IgSF protein), and simply fused to the sequence of the first membrane proximal domain in a similar fashion as the native IgSF protein (e.g. PD-L1). In some embodiments, the transmembrane immunomodulatory protein comprises a transmembrane domain of the corresponding wild-type or unmodified IgSF member, such as a transmembrane domain contained in the sequence of amino acids set forth in SEQ ID NO:3 (Table 2). In some embodiments, the membrane bound form comprises a transmembrane domain of the corresponding wild-type or unmodified polypeptide, such as corresponding to residues 239-259 of SEQ ID NO:3.

[0331] In some embodiments, the transmembrane domain is a non-native transmembrane domain that is not the transmembrane domain of native PD-L1. In some embodiments, the transmembrane domain is derived from a transmembrane domain from another non-PD-L1 family member polypeptide that is a membrane-bound or is a transmembrane protein. In some embodiments, a transmembrane anchor domain from another protein on T cells can be used. In some embodiments, the transmembrane domain is derived from CD8. In some embodiments, the transmembrane domain can further contain an extracellular portion of CD8 that serves as a spacer domain. An exemplary CD8 derived transmembrane domain is set forth in SEQ ID NO: 242 or 1164 or a portion thereof containing the CD8 transmembrane domain. In some embodiments, the transmembrane domain is a synthetic transmembrane domain.

[0332] In some embodiments, the transmembrane immunomodulatory protein further contains an endodomain, such as a cytoplasmic signaling domain, linked to the transmembrane domain. In some embodiments, the cytoplasmic signaling domain induces cell signaling. In some embodiments, the endodomain of the transmembrane immunomodulatory protein comprises the cytoplasmic domain of the corresponding wild-type or unmodified polypeptide, such as a cytoplasmic domain contained in the sequence of amino acids set forth in SEQ ID NO:3 (see Table 2).

[0333] In some embodiments, a provided transmembrane immunomodulatory protein that is or comprises a variant PD-L1 comprises a sequence of amino acids that exhibits at least 85%, 86%, 87%, 88%, 89%, 90%, 91%, 92%, 93%, 94%, 95%, 96%, 97%, 98% or 99% sequence identity to SEQ ID NO: 191 and contains an ectodomain comprising at least one affinity-modified PD-L1 IgSF domain as described and a transmembrane domain. In some embodiments, the transmembrane immunomodulatory protein contains any one or more amino acid substitutions in an IgSF domain (e.g. IgV domain) as described, including any set forth in Table 1. In some embodiments, the transmembrane immunomodulatory protein can further comprise a cytoplasmic domain as described. In some embodiments, the transmembrane immunomodulatory protein can further contain a signal peptide. In some embodiments, the signal peptide is the native signal peptide of wild-type IgSF member, such as contained in the sequence of amino acids set forth in SEQ ID NO:3 (see e.g. Table 2).

[0334] Also provided is a nucleic acid molecule encoding such transmembrane immunomodulatory proteins. In some embodiments, a nucleic acid molecule encoding a transmembrane immunomodulatory protein comprises a nucleotide sequence that encodes a sequence of amino acids that exhibits at least 85%, 86%, 87%, 88%, 89%, 90%, 91%, 92%, 93%, 94%, 95%, 96%, 97%, 98% or 99% sequence identity to SEQ ID NOS: 191 and contains an ectodomain comprising at least one affinity-modified IgSF domain as described, a transmembrane domain and, optionally, a cytoplasmic domain. In some embodiments, the nucleic acid molecule can further comprise a sequence of nucleotides encoding a signal peptide. In some embodiments, the signal peptide is the native signal peptide of the corresponding wild-type IgSF member (see e.g. Table 2).

[0335] In some embodiments, provided are CAR-related transmembrane immunomodulatory proteins in which the endodomain of a transmembrane immunomodulatory protein comprises a cytoplasmic signaling domain that comprises at least one ITAM (immunoreceptor tyrosine-based activation motif)-containing signaling domain. ITAM is a conserved motif found in a number of protein signaling domains involved in signal transduction of immune cells, including in the CD3-zeta chain (“CD3-z”) involved in T-cell receptor signal transduction. In some embodiments, the endodomain comprises at CD3-zeta signaling domain. In some embodiments, the CD3-zeta signaling domain comprises the sequence of amino acids set forth in SEQ ID NO: 243 or a sequence of amino acids that exhibits at least 85%, 86%, 87%, 88%, 89%, 90%, 91%, 92%, 93%, 94%, 95%, 96%, 97%, 98% or 99% to SEQ ID NO:243 and retains the activity of T cell signaling. In some embodiments, the endodomain of a CAR-related transmembrane immunomodulatory protein can further comprise a costimulatory signaling domain to further modulate immunomodulatory responses of the T-cell. In some embodiments, the costimulatory signaling domain is CD28, ICOS, 41BB or OX40. In some embodiments, the costimulatory signaling domain is a derived from CD28 or 4-1BB and comprises the sequence of amino acids set forth in any of SEQ ID NOS: 1165-1168 or a sequence of amino acids that exhibits at least 85%, 86%, 87%, 88%, 89%, 90%, 91%, 92%, 93%, 94%, 95%, 96%, 97%, 98% or 99% to SEQ ID NO:1165-1168 and retains the activity of T cell costimulatory signaling. In some embodiments, the provided CAR-related transmembrane immunomodulatory proteins have features of CARs to stimulate T cell signaling upon binding of an affinity modified IgSF domain to a cognate binding partner or counter structure. In some embodiments, upon specific binding by the affinity-modified IgSF domain to its counter structure can lead to changes in the immunological activity of the T-cell activity as reflected by changes in cytotoxicity, proliferation or cytokine production.

[0336] In some embodiments, the transmembrane immunomodulatory protein does not contain an endodomain capable of mediating cytoplasmic signaling. In some embodiments, the transmembrane immunomodulatory protein lacks the signal transduction mechanism of the wild-type or unmodified polypeptide and therefore does not itself induce cell signaling. In some embodiments, the transmembrane immunomodulatory protein lacks an intracellular (cytoplasmic) domain or a portion of the intracellular domain of the corresponding wild-type or unmodified polypeptide, such as a cytoplasmic signaling domain contained in the sequence of amino acids set forth in SEQ ID NO:3 (see Table 2). In some embodiments, the transmembrane immunomodulatory protein does not contain an ITIM (immunoreceptor tyrosine-based inhibition motif), such as contained in certain inhibitory receptors, including inhibitory receptors of the IgSF family (e.g. PD-1 or TIGIT). Thus, in some embodiments, the transmembrane immunomodulatory protein only contains the ectodomain and the transmembrane domain, such as any as described.

[0337] 2. Secreted Immunomodulatory Proteins and Engineered Cells

[0338] In some embodiments, the PD-L1 variant immunomodulatory polypeptide containing any one or more of the amino acid mutations as described herein, is secretable, such as when expressed from a cell. Such a variant PD-L1 immunomodulatory protein does not comprise a transmembrane domain. In some embodiments, the variant PD-L1 immunomodulatory protein is not conjugated to a half-life extending moiety (such as an Fc domain or a multimerization domain). In some embodiments, the variant PD-L1 immunomodulatory protein comprises a signal peptide, e.g. an antibody signal peptide or other efficient signal sequence to get domains outside of cell. When the immunomodulatory protein comprises a signal peptide and is expressed by an engineered cell, the signal peptide causes the immunomodulatory protein to be secreted by the engineered cell. Generally, the signal peptide, or a portion of the signal peptide, is cleaved from the immunomodulatory protein with secretion. The immunomodulatory protein can be encoded by a nucleic acid (which can be part of an expression vector). In some embodiments, the immunomodulatory protein is expressed and secreted by a cell (such as an immune cell, for example a primary immune cell).

[0339] Thus, in some embodiments, there are provided variant PD-L1 immunomodulatory proteins that further comprises a signal peptide. In some embodiments, provided herein is a nucleic acid molecule encoding the variant PD-L1 immunomodulatory protein operably connected to a secretion sequence encoding the signal peptide.

[0340] A signal peptide is a sequence on the N-terminus of an immunomodulatory protein that signals secretion of the immunomodulatory protein from a cell. In some embodiments, the signal peptide is about 5 to about 40 amino acids in length (such as about 5 to about 7, about 7 to about 10, about 10 to about 15, about 15 to about 20, about 20 to about 25, or about 25 to about 30, about 30 to about 35, or about 35 to about 40 amino acids in length).

[0341] In some embodiments, the signal peptide is a native signal peptide from the corresponding wild-type PD-L1 (see Table 2). In some embodiments, the signal peptide is a non-native signal peptide. For example, in some embodiments, the non-native signal peptide is a mutant native signal peptide from the corresponding wild-type PD-L1, and can include one or more (such as 2, 3, 4, 5, 6, 7, 8, 9, or 10 or more) substitutions insertions or deletions. In some embodiments, the non-native signal peptide is a signal peptide or mutant thereof of a family member from the same IgSF family as the wild-type IgSF family member. In some embodiments, the non-native signal peptide is a signal peptide or mutant thereof from an IgSF family member from a different IgSF family that the wild-type IgSF family member. In some embodiments, the signal peptide is a signal peptide or mutant thereof from a non-IgSF protein family, such as a signal peptide from an immunoglobulin (such as IgG heavy chain or IgG-kappa light chain), a cytokine (such as interleukin-2 (IL-2), or CD33), a serum albumin protein (e.g. HSA or albumin), a human azurocidin preprotein signal sequence, a luciferase, a trypsinogen (e.g. chymotrypsinogen or trypsinogen) or other signal peptide able to efficiently secrete a protein from a cell. Exemplary signal peptides include any described in the Table 9.

TABLE 9
Exemplary Signal Peptides

| SEQ ID NO | Signal Peptide | Peptide Sequence |
|---|---|---|
| SEQ ID NO: 221 | HSA signal peptide | MKWVTFISLLFLFSSAYS |
| SEQ ID NO: 222 | Ig kappa light chain | MDMRAPAGIFGFLLVLFPGYRS |
| SEQ ID NO: 223 | human azurocidin preprotein | MTRLTVLALLAGLLASSRA |
| | signal sequence | |
| SEQ ID NO: 224 | IgG heavy chain signal peptide | MELGLSWIFLLAILKGVQC |
| SEQ ID NO: 225 | IgG heavy chain signal peptide | MELGLRWVFLVAILEGVQC |
| SEQ ID NO: 226 | IgG heavy chain signal peptide | MKHLWFFLLLVAAPRWVLS |
| SEQ ID NO: 227 | IgG heavy chain signal peptide | MDWTWRILFLVAAATGAHS |
| SEQ ID NO: 228 | IgG heavy chain signal peptide | MDWTWRFLFVVAAATGVQS |
| SEQ ID NO: 229 | IgG heavy chain signal peptide | MEFGLSWLFLVAILKGVQC |
| SEQ ID NO: 230 | IgG heavy chain signal peptide | MEFGLSWVFLVALFRGVQC |
| SEQ ID NO: 231 | IgG heavy chain signal peptide | MDLLHKNMKHLWFFLLLVAAPRWVLS |
| SEQ ID NO: 232 | IgG Kappa light chain signal | MDMRVPAQLLGLLLLWLSGARC |
| | sequences: | |
| SEQ ID NO: 233 | IgG Kappa light chain signal | MKYLLPTAAAGLLLLAAQPAMA |
| | sequences: | |
| SEQ ID NO: 234 | Gaussia luciferase | MGVKVLFALICIAVAEA |
| SEQ ID NO: 235 | Human albumin | MKWVTFISLLFLFSSAYS |
| SEQ ID NO: 236 | Human chymotrypsinogen | MAFLWLLSCWALLGTTFG |
| SEQ ID NO: 237 | Human interleukin-2 | MQLLSCIALILALV |
| SEQ ID NO: 238 | Human trypsinogen-2 | MNLLLILTFVAAAVA |

[0342] In some embodiments of a secretable variant PD-L1 immunomodulatory protein, the immunomodulatory protein comprises a signal peptide when expressed, and the signal peptide (or a portion thereof) is cleaved from the immunomodulatory protein upon secretion.

[0343] In some embodiments, the engineered cells express a variant PD-L1 polypeptides that are secreted from the cell. In some embodiments, such a variant PD-L1 polypeptide is encoded by a nucleic acid molecule encoding an immunomodulatory protein under the operable control of a signal sequence for secretion. In some embodiments, the encoded immunomodulatory protein is secreted when expressed from a cell. In some embodiments, the immunomodulatory protein encoded by the nucleic acid molecule does not comprise a transmembrane domain. In some embodiments, the immunomodulatory protein encoded by the nucleic acid molecule does not comprise a half-life extending moiety (such as an Fc domain or a multimerization domain). In some embodiments, the immunomodulatory protein encoded by the nucleic acid molecule comprises a signal peptide. In some embodiments, a nucleic acid of the invention further comprises nucleotide sequence that encodes a secretory or signal peptide operably linked to the nucleic acid encoding the immunomodulatory protein, thereby allowing for secretion of the immunomodulatory protein

[0344] 3. Cells and Engineering Cells

[0345] Provided herein are engineered cells expressing any of the provided immunomodulatory polypeptide. In some embodiments, the engineered cells express on their surface any of the provided transmembrane immunomodulatory polypeptides. In some embodiments, the engineered cells express and are capable of or are able to secrete the immunomodulatory protein from the cells under conditions suitable for secretion of the protein. In some embodiments, the immunomodulatory protein is expressed on a lymphocyte such as a tumor infiltrating lymphocyte (TIL), T-cell or NK cell, or on a myeloid cell. In some embodiments, the engineered cells are antigen presenting cells (APCs). In some embodiments, the engineered cells are engineered mammalian T-cells or engineered mammalian antigen presenting cells (APCs). In some embodiments, the engineered T-cells or APCs are human or murine cells.

[0346] In some embodiments, engineered T-cells include, but are not limited to, T helper cell, cytotoxic T-cell (alternatively, cytotoxic T lymphocyte or CTL), natural killer T-cell, regulatory T-cell, memory T-cell, or gamma delta T-cell. In some embodiments, the engineered T cells are CD4+ or CD8+.

[0347] In some embodiments, the engineered APCs include, for example, MHC II expressing APCs such as macrophages, B cells, and dendritic cells, as well as artificial APCs (aAPCs) including both cellular and acellular (e.g., biodegradable polymeric microparticles) aAPCs. Artificial APCs (aAPCs) are synthetic versions of APCs that can act in a similar manner to APCs in that they present antigens to T-cells as well as activate them. Antigen presentation is performed by the MHC (Class I or Class II). In some embodiments, in engineered APCs such as aAPCs, the antigen that is loaded onto the MHC is, in some embodiments, a tumor specific antigen or a tumor associated antigen. The antigen loaded onto the MHC is recognized by a T-cell receptor (TCR) of a T cell, which, in some cases, can express PD-1 or CD80 or other molecule recognized by the variant PD-L1 polypeptides provided herein. Materials which can be used to engineer an aAPC include: poly (glycolic acid), poly(lactic-co-glycolic acid), iron-oxide, liposomes, lipid bilayers, sepharose, and polystyrene.

[0348] In some embodiments a cellular aAPC can be engineered to contain a TIP and TCR agonist which is used in adoptive cellular therapy. In some embodiments, a cellular aAPC can be engineered to contain a TIP and TCR agonist which is used in ex vivo expansion of human T cells, such as prior to administration, e.g., for reintroduction into the patient. In some aspects, the aAPC may include expression of at least one anti-CD3 antibody clone, e.g. such as, for example, OKT3 and/or UCHT1. In some aspects, the aAPCs may be inactivated (e.g. irradiated). In some embodiment, the TIP can include any variant IgSF domain that exhibits binding affinity for a cognate binding partner on a T cell.

[0349] In some embodiments, an immunomodulatory protein provided herein, such as a transmembrane immunomodulatory protein or a secretable immunomodulatory protein, is co-expressed or engineered into a cell that expresses an antigen-binding receptor, such as a recombinant receptor, such as a chimeric antigen receptor (CAR) or T cell receptor (TCR). In some embodiments, the engineered cell, such as an engineered T cell, recognizes a desired antigen associated with cancer, inflammatory and autoimmune disorders, or a viral infection. In specific embodiments, the antigen-binding receptor contains an antigen-binding moiety that specifically binds a tumor specific antigen or a tumor associated antigen. In some embodiments, the engineered T-cell is a CAR (chimeric antigen receptor) T-cell that contains an antigen-binding domain (e.g. scFv) that specifically binds to an antigen, such as a tumor specific antigen or tumor associated antigen. In some embodiments, the TIP protein is expressed in an engineered T-cell receptor cell or and engineered chimeric antigen receptor cell. In such embodiments, the engineered cell co-expresses the TIP and the CAR or TCR. In some embodiments, the SIP protein is expressed in an engineered T-cell receptor cell or an engineered chimeric antigen receptor cell. In such embodiments, the engineered cell co-expresses the SIP and the CAR or TCR.

[0350] Chimeric antigen receptors (CARs) are recombinant receptors that include an antigen-binding domain (ectodomain), a transmembrane domain and an intracellular signaling region (endodomain) that is capable of inducing or mediating an activation signal to the T cell after the antigen is bound. In some example, CAR-expressing cells are engineered to express an extracellular single chain variable fragment (scFv) with specificity for a particular tumor antigen linked to an intracellular signaling part comprising an activating domain and, in some cases, a costimulatory domain. The costimulatory domain can be derived from, e.g., CD28, OX-40, 4-1BB/CD137, inducible T cell costimulator (ICOS). The activating domain can be derived from, e.g., CD3, such as CD3 zeta, epsilon, delta, gamma, or the like. In certain embodiments, the CAR is designed to have two, three, four, or more costimulatory domains. The CAR scFv can be designed to target an antigen expressed on a cell associated with a disease or condition, e.g. a tumor antigen, such as, for example, CD19, which is a transmembrane protein expressed by cells in the B cell lineage, including all normal B cells and B cell malignances, including but not limited to NHL, CLL, and non-T cell ALL. Example CAR+ T cell therapies and constructs are described in U.S. Patent Publication Nos. 2013/0287748, 2014/0227237, 2014/0099309, and 2014/0050708, and these references are incorporated by reference in their entirety.

[0351] In some aspects, the antigen-binding domain is an antibody or antigen-binding fragment thereof, such as a single chain fragment (scFv). In some embodiments, the antigen is expressed on a tumor or cancer cell. Exemplary of an antigen is CD19. Exemplary of a CAR is an anti-CD19 CAR, such as a CAR containing an anti-CD19 scFv set forth in SEQ ID NO:1163 or SEQ ID NO:1174. In some embodiments, the CAR further contains a spacer, a transmembrane domain, and an intracellular signaling domain or region comprising an ITAM signaling domain, such as a CD3zeta signaling domain. In some embodiments, the CAR further includes a costimulatory signaling domain.

[0352] In some embodiments, the spacer and transmembrane domain are the hinge and transmembrane domain derived from CD8, such as having an exemplary sequence set forth in SEQ ID NO: 242, 1164, 2014 or a sequence of amino acids that exhibits at least 85%, 86%, 87%, 88%, 89%, 90%, 91%, 92%, 93%, 94%, 95%, 96%, 97%, 98%, 99% or more sequence identity to SEQ ID NO: 242, 1164, or 2014. In some embodiments, the endodomain comprises at CD3-zeta signaling domain. In some embodiments, the CD3-zeta signaling domain comprises the sequence of amino acids set forth in SEQ ID NO: 243 or a sequence of amino acids that exhibits at least 85%, 86%, 87%, 88%, 89%, 90%, 91%, 92%, 93%, 94%, 95%, 96%, 97%, 98% or 99% or more sequence identity to SEQ ID NO:243 and retains the activity of T cell signaling. In some embodiments, the endodomain of a CAR can further comprise a costimulatory signaling region to further modulate immunomodulatory responses of the T-cell. In some embodiments, the costimulatory signaling domain is or comprises a costimulatory region, or is derived from a costimulatory region, of CD28, ICOS, 41BB or OX40. In some embodiments, the costimulatory signaling domain is a derived from CD28 or 4-1BB and comprises the sequence of amino acids set forth in any of SEQ ID NOS: 1165-1168 or a sequence of amino acids that exhibits at least 85%, 86%, 87%, 88%, 89%, 90%, 91%, 92%, 93%, 94%, 95%, 96%, 97%, 98% or 99% or more sequence identity to SEQ ID NO:1165-1168 and retains the activity of T cell costimulatory signaling.

[0353] In some embodiments, the construct encoding the CAR further encodes a second protein, such as a marker, e.g. detectable protein, separated from the CAR by a self-cleaving peptide sequence. In some embodiments, the self-cleaving peptide sequence is an F2A, T2A, E2A or P2A self-cleaving peptide. Exemplary sequences of a T2A self-cleaving peptide are set for the in any one of SEQ ID NOS: 1167, 1177 or 2021 or a sequence of amino acids that exhibits at least 85%, 86%, 87%, 88%, 89%, 90%, 91%, 92%, 93%, 94%, 95%, 96%, 97%, 98% or 99% or more sequence identity to any of SEQ ID NOS: 1167, 1177 or 2021. In some embodiments, the T2A is encoded by the sequence of nucleotides set forth in SEQ ID NO:1176 or a sequence that exhibits at least 85%, 86%, 87%, 88%, 89%, 90%, 91%, 92%, 93%, 94%, 95%, 96%, 97%, 98% or 99% or more sequence identity to any of SEQ ID NO: 1176. An exemplary sequence of a P2A self-cleaving peptide is set in SEQ ID NO: 2026 or a sequence of amino acids that exhibits at least 85%, 86%, 87%, 88%, 89%, 90%, 91%, 92%, 93%, 94%, 95%, 96%, 97%, 98% or 99% or more sequence identity to SEQ ID NOS: 2026. In some cases, a nucleic acid construct that encodes more than one P2A self-cleaving peptide (such as a P2A1 and P2A2), in which the nucleotide sequence P2A1 and P2A2 each encode the P2A set forth in SEQ ID NO:2026, the nucleotide sequence may be different to avoid recombination between sequences.

[0354] In some embodiments, the marker is a detectable protein, such as a fluorescent protein, e.g. a green fluorescent protein (GFP) or blue fluorescent protein (BFP). Exemplary sequences of a fluorescent protein marker are set forth in SEQ ID NO: 1170, 2020, 2027-2029 or a sequence of amino acids that exhibits at least 85%, 86%, 87%, 88%, 89%, 90%, 91%, 92%, 93%, 94%, 95%, 96%, 97%, 98% or 99% or more sequence identity to SEQ ID NO: 1170 or 2020.

[0355] In some embodiments, the CAR has the sequence of amino acids set forth in any of SEQ ID NOS: 1160, 1171, 1172, 1173, 2015, 2016, 2018 or 2019 or a sequence of amino acids that exhibits at least 85%, 86%, 87%, 88%, 89%, 90%, 91%, 92%, 93%, 94%, 95%, 96%, 97%, 98% or 99% or more sequence identity to any one of SEQ ID NOS: 1160, 1171, 1172, 1173, 2015, 2016, 2018 or 2019. In some embodiments, the CAR is encoded by a sequence of nucleotides set forth in SEQ ID NO: 1175 or 2017 or a sequence of amino acids that exhibits at least 85%, 86%, 87%, 88%, 89%, 90%, 91%, 92%, 93%, 94%, 95%, 96%, 97%, 98% or 99% or more sequence identity to any one of SEQ ID NO: 1175 or 2017.

[0356] In another embodiment, the engineered T-cell possesses a TCR, including a recombinant or engineered TCR. In some embodiments, the TCR can be a native TCR. Those of skill in the art will recognize that generally native mammalian T-cell receptors comprise an alpha and a beta chain (or a gamma and a delta chain) involved in antigen specific recognition and binding. In some embodiments, the TCR is an engineered TCR that is modified. In some embodiments, the TCR of an engineered T-cell specifically binds to a tumor associated or tumor specific antigen presented by an APC.

[0357] In some embodiments, the immunomodulatory polypeptides, such as transmembrane immunomodulatory polypeptides or secretable immunomodulatory polypeptides, can be incorporated into engineered cells, such as engineered T cells or engineered APCs, by a variety of strategies such as those employed for recombinant host cells. A variety of methods to introduce a DNA construct into primary T cells are known in the art. In some embodiments, viral transduction or plasmid electroporation are employed. In typical embodiments, the nucleic acid molecule encoding the immunomodulatory protein, or the expression vector, comprises a signal peptide that localizes the expressed transmembrane immunomodulatory proteins to the cellular membrane or for secretion. In some embodiments, a nucleic acid encoding a transmembrane immunomodulatory proteins of the invention is sub-cloned into a viral vector, such as a retroviral vector, which allows expression in the host mammalian cell. The expression vector can be introduced into a mammalian host cell and, under host cell culture conditions, the immunomodulatory protein is expressed on the surface or is secreted.

[0358] In an exemplary example, primary T-cells can be purified ex vivo (CD4 cells or CD8 cells or both) and stimulated with an activation protocol consisting of various TCR/CD28 agonists, such as anti-CD3/anti-CD28 coated beads. After a 2 or 3 day activation process, a recombinant expression vector containing an immunomodulatory polypeptide can be stably introduced into the primary T cells through art standard lentiviral or retroviral transduction protocols or plasmid electroporation strategies. Cells can be monitored for immunomodulatory polypeptide expression by, for example, flow cytometry using anti-epitope tag or antibodies that cross-react with native parental molecule and polypeptides comprising variant PD-L1. T-cells that express the immunomodulatory polypeptide can be enriched through sorting with anti-epitope tag antibodies or enriched for high or low expression depending on the application.

[0359] Upon immunomodulatory polypeptide expression the engineered T-cell can be assayed for appropriate function by a variety of means. The engineered CAR or TCR co-expression can be validated to show that this part of the engineered T cell was not significantly impacted by the expression of the immunomodulatory protein. Once validated, standard in vitro cytotoxicity, proliferation, or cytokine assays (e.g., IFN-gamma expression) can be used to assess the function of engineered T-cells. Exemplary standard endpoints are percent lysis of the tumor line, proliferation of the engineered T-cell, or IFN-gamma protein expression in culture supernatants. An engineered construct which results in statistically significant increased lysis of tumor line, increased proliferation of the engineered T-cell, or increased IFN-gamma expression over the control construct can be selected for. Additionally, non-engineered, such as native primary or endogenous T-cells could also be incorporated into the same in vitro assay to measure the ability of the immunomodulatory polypeptide construct expressed on the engineered cells, such as engineered T-cells, to modulate activity, including, in some cases, to activate and generate effector function in bystander, native T-cells. Increased expression of activation markers such as CD69, CD44, or CD62L could be monitored on endogenous T cells, and increased proliferation and/or cytokine production could indicate desired activity of the immunomodulatory protein expressed on the engineered T cells.

[0360] In some embodiments, the similar assays can be used to compare the function of engineered T cells containing the CAR or TCR alone to those containing the CAR or TCR and a TIP construct. Typically, these in vitro assays are performed by plating various ratios of the engineered T cell and a “tumor” cell line containing the cognate CAR or TCR antigen together in culture. Standard endpoints are percent lysis of the tumor line, proliferation of the engineered T cell, or IFN-gamma production in culture supernatants. An engineered immunomodulatory protein which resulted in statistically significant increased lysis of tumor line, increased proliferation of the engineered T cell, or increased IFN-gamma production over the same TCR or CAR construct alone can be selected for. Engineered human T cells can be analyzed in immunocompromised mice, like the NSG strain, which lacks mouse T, NK and B cells. Engineered human T cells in which the CAR or TCR binds a target counter-structure on the xenograft and is co-expressed with the TIP affinity modified IgSF domain can be adoptively transferred in vivo at different cell numbers and ratios compared to the xenograft. For example, engraftment of CD19+ leukemia tumor lines containing a luciferase/GFP vector can be monitored through bioluminescence or ex vivo by flow cytometry. In a common embodiment, the xenograft is introduced into the murine model, followed by the engineered T cells several days later. Engineered T cells containing the immunomodulatory protein can be assayed for increased survival, tumor clearance, or expanded engineered T cells numbers relative to engineered T cells containing the CAR or TCR alone. As in the in vitro assay, endogenous, native (i.e., non-engineered) human T cells could be co-adoptively transferred to look for successful epitope spreading in that population, resulting in better survival or tumor clearance.

[0361] E. Infectious Agents Expressing Variant Polypeptides and Immunomodulatory Proteins

[0362] Also provided are infectious agents that contain nucleic acids encoding any of the variant polypeptides, such as PD-L1 vIgD polypeptides, including secretable or transmembrane immunomodulatory proteins described herein. In some embodiments, such infectious agents can deliver the nucleic acids encoding the variant immunomodulatory polypeptides described herein, such as PD-L1 vIgD polypeptides, to a target cell in a subject, e.g., immune cell and/or antigen-presenting cell (APC) or tumor cell in a subject. Also provided are nucleic acids contained in such infectious agents, and/or nucleic acids for generation or modification of such infectious agents, such as vectors and/or plasmids, and compositions containing such infectious agents.

[0363] In some embodiments, the infectious agent is a microorganism or a microbe. In some embodiments, the infectious agent is a virus or a bacterium. In some embodiments, the infectious agent is a virus. In some embodiments, the infectious agent is a bacterium. In some embodiments, such infectious agents can deliver nucleic acid sequences encoding any of the variant polypeptides, such as PD-L1 vIgD polypeptides, including secretable or transmembrane immunomodulatory proteins, described herein. Thus, in some embodiments, the cell in a subject that is infected or contacted by the infectious agents can be rendered to express on the cell surface or secrete, the variant immunomodulatory polypeptides. In some embodiments, the infectious agent can also deliver one or more other therapeutics or nucleic acids encoding other therapeutics to the cell and/or to an environment within the subject. In some embodiments, other therapeutics that can be delivered by the infectious agents include cytokines or other immunomodulatory molecules.

[0364] In some embodiments, the infectious agent, e.g., virus or bacteria, contains nucleic acid sequences that encode any of the variant polypeptides, such as PD-L1 vIgD polypeptides, including secretable or transmembrane immunomodulatory proteins, described herein, and by virtue of contact and/or infection of a cell in the subject, the cell expresses the variant polypeptides, such as PD-L1 vIgD polypeptides, including secretable or transmembrane immunomodulatory proteins, encoded by the nucleic acid sequences contained in the infectious agent. In some embodiments, the infectious agent can be administered to the subject. In some embodiments, the infectious agent can be contacted with cells from the subject ex vivo.

[0365] In some embodiments, the variant polypeptides, such as PD-L1 vIgD polypeptides, including transmembrane immunomodulatory proteins, expressed by the cell infected by the infectious agent is a transmembrane protein and is surface expressed. In some embodiments, the variant polypeptides, such as PD-L1 vIgD polypeptides, including secretable immunomodulatory proteins, expressed by the cell infected by the infectious agent is expressed and secreted from the cell. The transmembrane immunomodulatory protein or secreted immunomodulatory protein can be any described herein.

[0366] In some embodiments, the cells in the subject that are targeted by the infectious agent include a tumor cell, an immune cell, and/or an antigen-presenting cell (APC). In some embodiments, the infectious agent targets a cell in the tumor microenvironment (TME). In some embodiments, the infectious agent delivers the nucleic acids encoding the variant polypeptides, such as PD-L1 vIgD polypeptides, including secretable or transmembrane immunomodulatory proteins, to an appropriate cell (for example, an APC, such as a cell that displays a peptide/WIC complex on its cell surface, such as a dendritic cell) or tissue (e.g., lymphoid tissue) that will induce and/or augment the desired effect, e.g., immunomodulation and/or a specific cell-medicated immune response, e.g., CD4 and/or CD8 T cell response, which CD8 T cell response may include a cytotoxic T cell (CTL) response. In some embodiments, the infectious agent targets an APC, such as a dendritic cell (DC). In some embodiments, the nucleic acid molecule delivered by the infectious agents described herein include appropriate nucleic acid sequences necessary for the expression of the operably linked coding sequences encoding the variant immunomodulatory polypeptides, in a particular target cell, e.g., regulatory elements such as promoters.

[0367] In some embodiments, the infectious agent that contains nucleic acid sequences encoding the immunomodulatory polypeptides can also contain nucleic acid sequences that encode one or more additional gene products, e.g., cytokines, prodrug converting enzymes, cytotoxins and/or detectable gene products. For example, in some embodiments, the infectious agent is an oncolytic virus and the virus can include nucleic acid sequences encoding additional therapeutic gene products (see, e.g., Kirn et al., (2009) Nat Rev Cancer 9:64-71; Garcia-Aragoncillo et al., (2010) Curr Opin Mol Ther 12:403-411; see U.S. Pat. Nos. 7,588,767, 7,588,771, 7,662,398 and 7,754,221 and U.S. Pat. Publ. Nos. 2007/0202572, 2007/0212727, 2010/0062016, 2009/0098529, 2009/0053244, 2009/0155287, 2009/0117034, 2010/0233078, 2009/0162288, 2010/0196325, 2009/0136917 and 2011/0064650. In some embodiments, the additional gene product can be a therapeutic gene product that can result in death of the target cell (e.g., tumor cell) or gene products that can augment or boost or regulate an immune response (e.g., cytokine). Exemplary gene products also include among an anticancer agent, an anti-metastatic agent, an antiangiogenic agent, an immunomodulatory molecule, an immune checkpoint inhibitor, an antibody, a cytokine, a growth factor, an antigen, a cytotoxic gene product, a pro-apoptotic gene product, an anti-apoptotic gene product, a cell matrix degradative gene, genes for tissue regeneration or reprogramming human somatic cells to pluripotency, and other genes described herein or known to one of skill in the art. In some embodiments, the additional gene product is Granulocyte-macrophage colony-stimulating factor (GM-CSF).

[0368] 1. Viruses

[0369] In some embodiments, the infectious agent is a virus. In some embodiments, the infectious agent is an oncolytic virus, or a virus that targets particular cells, e.g., immune cells. In some embodiments, the infectious agent targets a tumor cell and/or cancer cell in the subject. In some embodiments, the infectious agent targets an immune cell or an antigen-presenting cell (APC).

[0370] In some embodiments, the infectious agent is an oncolytic virus. Oncolytic viruses are viruses that accumulate in tumor cells and replicate in tumor cells. By virtue of replication in the cells, and optional delivery of nucleic acids encoding variant PD-L1 polypeptide or immunomodulatory polypeptides described herein, tumor cells are lysed, and the tumor shrinks and can be eliminated. Oncolytic viruses can also have a broad host and cell type range. For example, oncolytic viruses can accumulate in immunoprivileged cells or immunoprivileged tissues, including tumors and/or metastases, and also including wounded tissues and cells, thus allowing the delivery and expression of nucleic acids encoding the variant immunomodulatory polypeptides described herein in a broad range of cell types. Oncolytic viruses can also replicate in a tumor cell specific manner, resulting in tumor cell lysis and efficient tumor regression.

[0371] Exemplary oncolytic viruses include adenoviruses, adeno-associated viruses, herpes viruses, Herpes Simplex Virus, Vesticular Stomatic virus, Reovirus, Newcastle Disease virus, parvovirus, measles virus, vesticular stomatitis virus (VSV), Coxsackie virus and Vaccinia virus. In some embodiments, oncolytic viruses can specifically colonize solid tumors, while not infecting other organs, and can be used as an infectious agent to deliver the nucleic acids encoding the variant immunomodulatory polypeptides described herein to such solid tumors.

[0372] Oncolytic viruses for use in delivering the nucleic acids encoding variant PD-L1 polypeptides or immunomodulatory polypeptides described herein, can be any of those known to one of skill in the art and include, for example, vesicular stomatitis virus, see, e.g., U.S. Pat. Nos. 7,731,974, 7,153,510, 6,653,103 and U.S. Pat. Pub. Nos. 2010/0178684, 2010/0172877, 2010/0113567, 2007/0098743, 20050260601, 20050220818 and EP Pat. Nos. 1385466, 1606411 and 1520175; herpes simplex virus, see, e.g., U.S. Pat. Nos. 7,897,146, 7,731,952, 7,550,296, 7,537,924, 6,723,316, 6,428,968 and U.S. Pat. Pub. Nos., 2014/0154216, 2011/0177032, 2011/0158948, 2010/0092515, 2009/0274728, 2009/0285860, 2009/0215147, 2009/0010889, 2007/0110720, 2006/0039894, 2004/0009604, 2004/0063094, International Patent Pub. Nos., WO 2007/052029, WO 1999/038955; retroviruses, see, e.g., U.S. Pat. Nos. 6,689,871, 6,635,472, 5,851,529, 5,716,826, 5,716,613 and U.S. Pat. Pub. No. 20110212530; vaccinia viruses, see, e.g., 2016/0339066, and adeno-associated viruses, see, e.g., U.S. Pat. Nos. 8,007,780, 7,968,340, 7,943,374, 7,906,111, 7,927,585, 7,811,814, 7,662,627, 7,241,447, 7,238,526, 7,172,893, 7,033,826, 7,001,765, 6,897,045, and 6,632,670.

[0373] Oncolytic viruses also include viruses that have been genetically altered to attenuate their virulence, to improve their safety profile, enhance their tumor specificity, and they have also been equipped with additional genes, for example cytotoxins, cytokines, prodrug converting enzymes to improve the overall efficacy of the viruses (see, e.g., Kirn et al., (2009) Nat Rev Cancer 9:64-71; Garcia-Aragoncillo et al., (2010) Curr Opin Mol Ther 12:403-411; see U.S. Pat. Nos. 7,588,767, 7,588,771, 7,662,398 and 7,754,221 and U.S. Pat. Publ. Nos. 2007/0202572, 2007/0212727, 2010/0062016, 2009/0098529, 2009/0053244, 2009/0155287, 2009/0117034, 2010/0233078, 2009/0162288, 2010/0196325, 2009/0136917 and 2011/0064650). In some embodiments, the oncolytic viruses can be those that have been modified so that they selectively replicate in cancerous cells, and, thus, are oncolytic. For example, the oncolytic virus is an adenovirus that has been engineered to have modified tropism for tumor therapy and also as gene therapy vectors. Exemplary of such is ONYX-015, H101 and Ad5ΔCR (Hallden and Portella (2012) Expert Opin Ther Targets, 16:945-58) and TNFerade (McLoughlin et al. (2005) Ann. Surg. Oncol., 12:825-30), or a conditionally replicative adenovirus Oncorine®.

[0374] In some embodiments, the infectious agent is a modified herpes simplex virus. In some embodiments, the infectious agent is a modified version of Talimogene laherparepvec (also known as T-Vec, Imlygic or OncoVex GM-CSF), that is modified to contain nucleic acids encoding any of the variant immunomodulatory polypeptides described herein, such as variant PD-L1 polypeptide described herein. In some embodiments, the infectious agent is a modified herpes simplex virus that is described, e.g., in WO 2007/052029, WO 1999/038955, US 2004/0063094, US 2014/0154216, or, variants thereof.

[0375] In some embodiments, the infectious agent is a virus that targets a particular type of cells in a subject that is administered the virus, e.g., a virus that targets immune cells or antigen-presenting cells (APCs). Dendritic cells (DCs) are essential APCs for the initiation and control of immune responses. DCs can capture and process antigens, migrate from the periphery to a lymphoid organ, and present the antigens to resting T cells in a major histocompatibility complex (MHC)-restricted fashion. In some embodiments, the infectious agent is a virus that specifically can target DCs to deliver nucleic acids encoding the variant PD-L1 polypeptides or immunomodulatory polypeptides for expression in DCs. In some embodiments, the virus is a lentivirus or a variant or derivative thereof, such as an integration-deficient lentiviral vector. In some embodiments, the virus is a lentivirus that is pseudotyped to efficiently bind to and productively infect cells expressing the cell surface marker dendritic cell-specific intercellular adhesion molecule-3-grabbing non-integrin (DC-SIGN), such as DCs. In some embodiments, the virus is a lentivirus pseudotyped with a Sindbis virus E2 glycoprotein or modified form thereof, such as those described in WO 2013/149167. In some embodiments, the virus allows for delivery and expression of a sequence of interest (e.g., a nucleic acid encoding any of the variant PD-L1 polypeptides or immunomodulatory polypeptides described herein) to a DC. In some embodiments, the virus includes those described in WO 2008/011636 or US 2011/0064763, Tareen et al. (2014) Mol. Ther., 22:575-587, or variants thereof. Exemplary of a dendritic cell-tropic vector platform is ZVex™.

[0376] 2. Bacteria

[0377] In some embodiments, the infectious agent is a bacterium. For example, in some embodiments, the bacteria can deliver nucleic acids encoding any of the variant immunomodulatory polypeptides described herein to a target cell in the subject, such as a tumor cell, an immune cell, an antigen-presenting cell and/or a phagocytic cell. In some embodiments, the bacterium can be preferentially targeted to a specific environment within a subject, such as a tumor microenvironment (TME), for expression and/or secretion of the variant immunomodulatory polypeptides and/or to target specific cells in the environment for expression of the variant immunomodulatory polypeptides.

[0378] In some embodiments, the bacterium delivers the nucleic acids to the cells via bacterial-mediated transfer of plasmid DNA to mammalian cells (also referred to as “bactofection”). For example, in some embodiments, delivery of genetic material is achieved through entry of the entire bacterium into target cells. In some embodiments, spontaneous or induced bacterial lysis can lead to the release of plasmid for subsequent eukaryotic cell expression. In some embodiments, the bacterium can deliver nucleic acids to non-phagocytic mammalian cells (e.g., tumor cells) and/or to phagocytic cells, e.g., certain immune cells and/or APCs. In some embodiments, the nucleic acids delivered by the bacterium can be transferred to the nucleus of the cell in the subject for expression. In some embodiments, the nucleic acids also include appropriate nucleic acid sequences necessary for the expression of the operably linked sequences encoding the variant immunomodulatory polypeptides in a particular host cell, e.g., regulatory elements such as promoters or enhancers. In some embodiments, the infectious agent that is a bacterium can deliver nucleic acids encoding the immunomodulatory proteins in the form of an RNA, such as a pre-made translation-competent RNA delivered to the cytoplasm of the target cell for translation by the target cell's machinery.

[0379] In some embodiments, the bacterium can replicate and lyse the target cells, e.g., tumor cells. In some embodiments, the bacterium can contain and/or release nucleic acid sequences and/or gene products in the cytoplasm of the target cells, thereby killing the target cell, e.g., tumor cell. In some embodiments, the infectious agent is bacterium that can replicate specifically in a particular environment in the subject, e.g., tumor microenvironment (TME). For example, in some embodiments, the bacterium can replicate specifically in anaerobic or hypoxic microenvironments. In some embodiments, conditions or factors present in particular environments, e.g., aspartate, serine, citrate, ribose or galactose produced by cells in the TME, can act as chemoattractants to attract the bacterium to the environment. In some embodiments, the bacterium can express and/or secrete the immunomodulatory proteins described herein in the environment, e.g., TME.

[0380] In some embodiments, the infectious agent is a bacterium that is a Listeria sp., a Bifidobacterium sp., an Escherichia sp., a Clostridium sp., a Salmonella sp., a Shigella sp., a Vibrio sp. or a Yersinia sp. In some embodiments, the bacterium is selected from among one or more of Listeria monocytogenes, Salmonella typhimurium, Salmonella choleraesuis, Escherichia coli, Vibrio cholera, Clostridium perfringens, Clostridium butyricum, Clostridium novyi, Clostridium acetobutylicum, Bifidobacterium infantis, Bifidobacterium longum and Bifidobacterium adolescentis. In some embodiments, the bacterium is an engineered bacterium. In some embodiments, the bacterium is an engineered bacterium such as those described in, e.g., Seow and Wood (2009) Molecular Therapy 17(5):767-777; Baban et al. (2010) Bioengineered Bugs 1:6, 385-394; Patyar et al. (2010) J Biomed Sci 17:21; Tangney et al. (2010) Bioengineered Bugs 1:4, 284-287; van Pijkeren et al. (2010) Hum Gene Ther. 21(4):405-416; WO 2012/149364; WO 2014/198002; U.S. Pat. Nos. 9,103,831; 9,453,227; US 2014/0186401; US 2004/0146488; US 2011/0293705; US 2015/0359909 and EP 3020816. The bacterium can be modified to deliver nucleic acid sequences encoding any of the variant immunomodulatory polypeptides, conjugates and/or fusions provided herein, and/or to express such variant immunomodulatory polypeptides in the subject.

[0381] F. Nucleic Acids, Vectors and Methods for Producing the Polypeptides or Cells

[0382] Provided herein are isolated or recombinant nucleic acids collectively referred to as “nucleic acids” which encode any of the various provided embodiments of the variant PD-L1 polypeptides or immunomodulatory polypeptides provided herein. In some embodiments, nucleic acids provided herein, including all described below, are useful in recombinant production (e.g., expression) of variant PD-L1 polypeptides or immunomodulatory polypeptides provided herein. In some embodiments, nucleic acids provided herein, including all described below, are useful in expression of variant PD-L1 polypeptides or immunomodulatory polypeptides provided herein in cells, such as in engineered cells, e.g. immune cells, or infectious agent cells. The nucleic acids provided herein can be in the form of RNA or in the form of DNA, and include mRNA, cRNA, recombinant or synthetic RNA and DNA, and cDNA. The nucleic acids provided herein are typically DNA molecules, and usually double-stranded DNA molecules. However, single-stranded DNA, single-stranded RNA, double-stranded RNA, and hybrid DNA/RNA nucleic acids or combinations thereof comprising any of the nucleotide sequences of the invention also are provided.

[0383] Also provided herein are recombinant expression vectors and recombinant host cells useful in producing the variant PD-L1 polypeptides or immunomodulatory polypeptides provided herein.

[0384] Also provided herein are engineered cells, such as engineered immune cells, containing any of the provided nucleic acids or encoded variant PD-L1 polypeptides or immunomodulatory polypeptides, such as any of the transmembrane immunomodulatory polypeptides or secretable immunomodulatory polypeptides.

[0385] Also provided herein are infectious agents, such as bacterial or viral cells, containing any of the provided nucleic acids or encoded variant PD-L1 polypeptides or immunomodulatory polypeptides, such as any of the transmembrane immunomodulatory polypeptides or secretable immunomodulatory polypeptides.

[0386] In any of the above provided embodiments, the nucleic acids encoding the immunomodulatory polypeptides provided herein can be introduced into cells using recombinant DNA and cloning techniques. To do so, a recombinant DNA molecule encoding an immunomodulatory polypeptide is prepared. Methods of preparing such DNA molecules are well known in the art. For instance, sequences coding for the peptides could be excised from DNA using suitable restriction enzymes. Alternatively, the DNA molecule could be synthesized using chemical synthesis techniques, such as the phosphoramidite method. Also, a combination of these techniques could be used. In some instances, a recombinant or synthetic nucleic acid may be generated through polymerase chain reaction (PCR). In some embodiments, a DNA insert can be generated encoding one or more variant PD-L1 polypeptides containing at least one affinity-modified IgSF domain and, in some embodiments, a signal peptide, a transmembrane domain and/or an endodomain in accord with the provided description. This DNA insert can be cloned into an appropriate transduction/transfection vector as is known to those of skill in the art. Also provided are expression vectors containing the nucleic acid molecules.

[0387] In some embodiments, the expression vectors are capable of expressing the immunomodulatory proteins in an appropriate cell under conditions suited to expression of the protein. In some aspects, nucleic acid molecule or an expression vector comprises the DNA molecule that encodes the immunomodulatory protein operatively linked to appropriate expression control sequences. Methods of effecting this operative linking, either before or after the DNA molecule is inserted into the vector, are well known. Expression control sequences include promoters, activators, enhancers, operators, ribosomal binding sites, start signals, stop signals, cap signals, polyadenylation signals, and other signals involved with the control of transcription or translation.

[0388] In some embodiments, expression of the immunomodulatory protein is controlled by a promoter or enhancer to control or regulate expression. The promoter is operably linked to the portion of the nucleic acid molecule encoding the variant polypeptide or immunomodulatory protein. In some embodiments, the promotor is a constitutively active promotor (such as a tissue-specific constitutively active promotor or other constitutive promotor). In some embodiments, the promotor is an inducible promotor, which may be responsive to an inducing agent (such as a T cell activation signal).

[0389] In some embodiments, a constitutive promoter is operatively linked to the nucleic acid molecule encoding the variant polypeptide or immunomodulatory protein. Exemplary constitutive promoters include the Simian vacuolating virus 40 (SV40) promoter, the cytomegalovirus (CMV) promoter, the ubiquitin C (UbC) promoter, and the EF-1 alpha (EF1a) promoter. In some embodiments, the constitutive promoter is tissue specific. For example, in some embodiments, the promoter allows for constitutive expression of the immunomodulatory protein in specific tissues, such as immune cells, lymphocytes, or T cells. Exemplary tissue-specific promoters are described in U.S. Pat. No. 5,998,205, including, for example, a fetoprotein, DF3, tyrosinase, CEA, surfactant protein, and ErbB2 promoters.

[0390] In some embodiments, an inducible promoter is operatively linked to the nucleic acid molecule encoding the variant polypeptide or immunomodulatory protein such that expression of the nucleic acid is controllable by controlling the presence or absence of the appropriate inducer of transcription. For example, the promoter can be a regulated promoter and transcription factor expression system, such as the published tetracycline-regulated systems or other regulatable systems (see, e.g. published International PCT Appl. No. WO 01/30843), to allow regulated expression of the encoded polypeptide. An exemplary regulatable promoter system is the Tet-On (and Tet-Off) system available, for example, from Clontech (Palo Alto, Calif.). This promoter system allows the regulated expression of the transgene controlled by tetracycline or tetracycline derivatives, such as doxycycline. Other regulatable promoter systems are known (see e.g., published U.S. Application No. 2002-0168714, entitled “Regulation of Gene Expression Using Single-Chain, Monomeric, Ligand Dependent Polypeptide Switches,” which describes gene switches that contain ligand binding domains and transcriptional regulating domains, such as those from hormone receptors).

[0391] In some embodiments, the promotor is responsive to an element responsive to T-cell activation signaling. Solely by way of example, in some embodiments, an engineered T cell comprises an expression vector encoding the immunomodulatory protein and a promotor operatively linked to control expression of the immunomodulatory protein. The engineered T cell can be activated, for example by signaling through an engineered T cell receptor (TCR) or a chimeric antigen rector (CAR), and thereby triggering expression and secretion of the immunomodulatory protein through the responsive promotor.

[0392] In some embodiments, an inducible promoter is operatively linked to the nucleic acid molecule encoding the immunomodulatory protein such that the immunomodulatory protein is expressed in response to a nuclear factor of activated T-cells (NFAT) or nuclear factor kappa-light-chain enhancer of activated B cells (NF-κB). For example, in some embodiments, the inducible promoter comprises a binding site for NFAT or NF-κB. For example, in some embodiments, the promoter is an NFAT or NF-κB promoter or a functional variant thereof. Thus, in some embodiments, the nucleic acids make it possible to control the expression of immunomodulatory protein while also reducing or eliminating the toxicity of the immunomodulatory protein. In particular, engineered immune cells comprising the nucleic acids of the invention express and secrete the immunomodulatory protein only when the cell (e.g., a T-cell receptor (TCR) or a chimeric antigen receptor (CAR) expressed by the cell) is specifically stimulated by an antigen and/or the cell (e.g., the calcium signaling pathway of the cell) is non-specifically stimulated by, e.g., phorbol myristate acetate (PMA)/Ionomycin. Accordingly, the expression and, in some cases, secretion, of immunomodulatory protein can be controlled to occur only when and where it is needed (e.g., in the presence of an infectious disease-causing agent, cancer, or at a tumor site), which can decrease or avoid undesired immunomodulatory protein interactions.

[0393] In some embodiments, the nucleic acid encoding an immunomodulatory protein described herein comprises a suitable nucleotide sequence that encodes a NFAT promoter, NF-κB promoter, or a functional variant thereof. “NFAT promoter” as used herein means one or more NFAT responsive elements linked to a minimal promoter. “NF-κB promoter” refers to one or more NF-κB responsive elements linked to a minimal promoter. In some embodiments, the minimal promoter of a gene is a minimal human IL-2 promoter or a CMV promoter. The NFAT responsive elements may comprise, e.g., NFAT1, NFAT2, NFAT3, and/or NFAT4 responsive elements. The NFAT promoter, NF-κB promoter, or a functional variant thereof may comprise any number of binding motifs, e.g., at least two, at least three, at least four, at least five, or at least six, at least seven, at least eight, at least nine, at least ten, at least eleven, or up to twelve binding motifs.

[0394] The resulting recombinant expression vector having the DNA molecule thereon is used to transform an appropriate host. This transformation can be performed using methods well known in the art. In some embodiments, a nucleic acid provided herein further comprises nucleotide sequence that encodes a secretory or signal peptide operably linked to the nucleic acid encoding an immunomodulatory polypeptide such that a resultant soluble immunomodulatory polypeptide is recovered from the culture medium, host cell, or host cell periplasm. In other embodiments, the appropriate expression control signals are chosen to allow for membrane expression of an immunomodulatory polypeptide. Furthermore, commercially available kits as well as contract manufacturing companies can also be utilized to make engineered cells or recombinant host cells provided herein.

[0395] In some embodiments, the resulting expression vector having the DNA molecule thereon is used to transform, such as transduce, an appropriate cell. The introduction can be performed using methods well known in the art. Exemplary methods include those for transfer of nucleic acids encoding the receptors, including via viral, e.g., retroviral or lentiviral, transduction, transposons, and electroporation. In some embodiments, the expression vector is a viral vector. In some embodiments, the nucleic acid is transferred into cells by lentiviral or retroviral transduction methods.

[0396] Any of a large number of publicly available and well-known mammalian host cells, including mammalian T-cells or APCs, can be used in the preparing the polypeptides or engineered cells. The selection of a cell is dependent upon a number of factors recognized by the art. These include, for example, compatibility with the chosen expression vector, toxicity of the peptides encoded by the DNA molecule, rate of transformation, ease of recovery of the peptides, expression characteristics, bio-safety and costs. A balance of these factors must be struck with the understanding that not all cells can be equally effective for the expression of a particular DNA sequence.

[0397] In some embodiments, the host cells can be a variety of eukaryotic cells, such as in yeast cells, or with mammalian cells such as Chinese hamster ovary (CHO) or HEK293 cells. In some embodiments, the host cell is a suspension cell and the polypeptide is engineered or produced in cultured suspension, such as in cultured suspension CHO cells, e.g. CHO-S cells. In some examples, the cell line is a CHO cell line that is deficient in DHFR (DHFR−), such as DG44 and DUXB11. In some embodiments, the cell is deficient in glutamine synthase (GS), e.g. CHO-S cells, CHOK1 SV cells, and CHOZN((R)) GS−/− cells. In some embodiments, the CHO cells, such as suspension CHO cells, may be CHO-S-2H2 cells, CHO-S-clone 14 cells, or ExpiCHO-S cells.

[0398] In some embodiments, host cells can also be prokaryotic cells, such as with E. coli. The transformed recombinant host is cultured under polypeptide expressing conditions, and then purified to obtain a soluble protein. Recombinant host cells can be cultured under conventional fermentation conditions so that the desired polypeptides are expressed. Such fermentation conditions are well known in the art. Finally, the polypeptides provided herein can be recovered and purified from recombinant cell cultures by any of a number of methods well known in the art, including ammonium sulfate or ethanol precipitation, acid extraction, anion or cation exchange chromatography, phosphocellulose chromatography, hydrophobic interaction chromatography, and affinity chromatography. Protein refolding steps can be used, as desired, in completing configuration of the mature protein. Finally, high performance liquid chromatography (HPLC) can be employed in the final purification steps.

[0399] In some embodiments, the cell is an immune cell, such as any described above in connection with preparing engineered cells. In some embodiments, such engineered cells are primary cells. In some embodiments, the engineered cells are autologous to the subject. In some embodiment, the engineered cells are allogeneic to the subject. In some embodiments, the engineered cells are obtained from a subject, such as by leukapheresis, and transformed ex vivo for expression of the immunomodulatory polypeptide, e.g. transmembrane immunomodulatory polypeptide or secretable immunomodulatory polypeptide.

[0400] Also provided are nucleic acids encoding any of the variant immunomodulatory polypeptides contained in infectious agents described herein. In some embodiments, the infectious agents deliver the nucleic acids to a cell in the subject, and/or permit expression of the encoded variant polypeptides in the cell. Also provided are nucleic acids that are used to generate, produce or modify such infectious agents. For example, in some embodiments, provided are vectors and/or plasmids that contain nucleic acids encoding the variant immunomodulatory polypeptides, for generation of the infectious agents, delivery to the cells in a subject and/or expression of the variant immunomodulatory polypeptides in the cells in the subject.

[0401] In some embodiments, the provided nucleic acids are recombinant viral or bacterial vectors containing nucleic acid sequences encoding the variant immunomodulatory polypeptides. In some embodiments, the recombinant vectors can be used to produce an infectious agent that contains nucleic acid sequences encoding the variant immunomodulatory polypeptides and/or to be delivered to a target cell in the subject for expression by the target cell. In some embodiments, the recombinant vector is an expression vector. In some embodiments, the recombinant vector includes appropriate sequences necessary for generation and/or production of the infectious agent and expression in the target cell.

[0402] In some embodiments, the recombinant vector is a plasmid or cosmid. Plasmid or cosmid containing nucleic acid sequences encoding the variant immunomodulatory polypeptides, as described herein, is readily constructed using standard techniques well known in the art. For generation of the infectious agent, the vector or genome can be constructed in a plasmid form that can then be transfected into a packaging or producer cell line or a host bacterium. The recombinant vectors can be generated using any of the recombinant techniques known in the art. In some embodiments, the vectors can include a prokaryotic origin of replication and/or a gene whose expression confers a detectable or selectable marker such as a drug resistance for propagation and/or selection in prokaryotic systems.

[0403] In some embodiments, the recombinant vector is a viral vector. Exemplary recombinant viral vectors include a lentiviral vector genome, poxvirus vector genome, vaccinia virus vector genome, adenovirus vector genome, adenovirus-associated virus vector genome, herpes virus vector genome, and alpha virus vector genome. Viral vectors can be live, attenuated, replication conditional or replication deficient, non-pathogenic (defective), replication competent viral vector, and/or is modified to express a heterologous gene product, e.g., the variant immunomodulatory polypeptides provided herein. Vectors for generation of viruses also can be modified to alter attenuation of the virus, which includes any method of increasing or decreasing the transcriptional or translational load.

[0404] Exemplary viral vectors that can be used include modified vaccinia virus vectors (see, e.g., Guerra et al., J. Virol. 80:985-98 (2006); Tartaglia et al., AIDS Research and Human Retroviruses 8: 1445-47 (1992); Gheradi et al., J. Gen. Virol. 86:2925-36 (2005); Mayr et al., Infection 3:6-14 (1975); Hu et al., J. Virol. 75: 10300-308 (2001); U.S. Pat. Nos. 5,698,530, 6,998,252, 5,443,964, 7,247,615 and 7,368,116); adenovirus vector or adenovirus-associated virus vectors (see., e.g., Molin et al., J. Virol. 72:8358-61 (1998); Narumi et al., Am J. Respir. Cell Mol. Biol. 19:936-41 (1998); Mercier et al., Proc. Natl. Acad. Sci. USA 101:6188-93 (2004); U.S. Pat. Nos. 6,143,290; 6,596,535; 6,855,317; 6,936,257; 7,125,717; 7,378,087; 7,550,296); retroviral vectors including those based upon murine leukemia virus (MuLV), gibbon ape leukemia virus (GaLV), ecotropic retroviruses, simian immunodeficiency virus (SIV), human immunodeficiency virus (HIV), and combinations (see, e.g., Buchscher et al., J. Virol. 66:2731-39 (1992); Johann et al., J. Virol. 66: 1635-40 (1992); Sommerfelt et al., Virology 176:58-59 (1990); Wilson et al., J. Virol. 63:2374-78 (1989); Miller et al., J. Virol. 65:2220-24 (1991); Miller et al., Mol. Cell Biol. 10:4239 (1990); Kolberg, NIH Res. 4:43 1992; Cornetta et al., Hum. Gene Ther. 2:215 (1991)); lentiviral vectors including those based upon Human Immunodeficiency Virus (HIV-1), HIV-2, feline immunodeficiency virus (FIV), equine infectious anemia virus, Simian Immunodeficiency Virus (SIV), and maedi/visna virus (see, e.g., Pfeifer et al., Annu. Rev. Genomics Hum. Genet. 2: 177-211 (2001); Zufferey et al., J. Virol. 72: 9873, 1998; Miyoshi et al., J. Virol. 72:8150, 1998; Philpott and Thrasher, Human Gene Therapy 18:483, 2007; Engelman et al., J. Virol. 69: 2729, 1995; Nightingale et al., Mol. Therapy, 13: 1121, 2006; Brown et al., J. Virol. 73:9011 (1999); WO 2009/076524; WO 2012/141984; WO 2016/011083; McWilliams et al., J. Virol. 77: 11150, 2003; Powell et al., J. Virol. 70:5288, 1996) or any, variants thereof, and/or vectors that can be used to generate any of the viruses described above. In some embodiments, the recombinant vector can include regulatory sequences, such as promoter or enhancer sequences, that can regulate the expression of the viral genome, such as in the case for RNA viruses, in the packaging cell line (see, e.g., U.S. Pat. Nos. 5,385,839 and 5,168,062).

[0405] In some embodiments, the recombinant vector is an expression vector, e.g., an expression vector that permits expression of the encoded gene product when delivered into the target cell, e.g., a cell in the subject, e.g., a tumor cell, an immune cell and/or an APC. In some embodiments, the recombinant expression vectors contained in the infectious agent are capable of expressing the immunomodulatory proteins in the target cell in the subject, under conditions suited to expression of the protein.

[0406] In some aspects, nucleic acids or an expression vector comprises a nucleic acid sequence that encodes the immunomodulatory protein operatively linked to appropriate expression control sequences. Methods of affecting this operative linking, either before or after the nucleic acid sequence encoding the immunomodulatory protein is inserted into the vector, are well known. Expression control sequences include promoters, activators, enhancers, operators, ribosomal binding sites, start signals, stop signals, cap signals, polyadenylation signals, and other signals involved with the control of transcription or translation. The promoter can be operably linked to the portion of the nucleic acid sequence encoding the immunomodulatory protein. In some embodiments, the promotor is a constitutively active promotor in the target cell (such as a tissue-specific constitutively active promotor or other constitutive promotor). For example, the recombinant expression vector may also include, lymphoid tissue-specific transcriptional regulatory elements (TRE) such as a B lymphocyte, T lymphocyte, or dendritic cell specific TRE. Lymphoid tissue specific TRE are known in the art (see, e.g., Thompson et al., Mol. Cell. Biol. 12:1043-53 (1992); Todd et al., J. Exp. Med. 177:1663-74 (1993); Penix et al., J. Exp. Med. 178:1483-96 (1993)). In some embodiments, the promotor is an inducible promotor, which may be responsive to an inducing agent (such as a T cell activation signal). In some embodiments, nucleic acids delivered to the target cell in the subject, e.g., tumor cell, immune cell and/or APC, can be operably linked to any of the regulatory elements described above.

[0407] In some embodiments, the vector is a bacterial vector, e.g., a bacterial plasmid or cosmid. In some embodiments, the bacterial vector is delivered to the target cell, e.g., tumor cells, immune cells and/or APCs, via bacterial-mediated transfer of plasmid DNA to mammalian cells (also referred to as “bactofection”). In some embodiments, the delivered bacterial vector also contains appropriate expression control sequences for expression in the target cells, such as a promoter sequence and/or enhancer sequences, or any regulatory or control sequences described above. In some embodiments, the bacterial vector contains appropriate expression control sequences for expression and/or secretion of the encoded variant polypeptides in the infectious agent, e.g., the bacterium.

[0408] In some embodiments, polypeptides provided herein can also be made by synthetic methods. Solid phase synthesis is the preferred technique of making individual peptides since it is the most cost-effective method of making small peptides. For example, well known solid phase synthesis techniques include the use of protecting groups, linkers, and solid phase supports, as well as specific protection and deprotection reaction conditions, linker cleavage conditions, use of scavengers, and other aspects of solid phase peptide synthesis. Peptides can then be assembled into the polypeptides as provided herein.

### IV. METHODS OF ASSESSING ACTIVITY IMMUNE MODULATION OF VARIANT PD-L1 POLYPEPTIDES AND IMMUNOMODULATORY PROTEINS

[0409] In some embodiments, the variant PD-L1 polypeptides provided herein (e.g. full-length and/or specific binding fragments or conjugates, stack constructs or fusion thereof, engineered cells or infectious agents) exhibit immunomodulatory activity to modulate T cell activation. In some embodiments, PD-L1 polypeptides modulate IFN-gamma expression in a T cell assay relative to a wild-type or unmodified PD-L1 control. In some cases, modulation of IFN-gamma expression can increase or decrease IFN-gamma expression relative to the control. Assays to determine specific binding and IFN-gamma expression are well-known in the art and include the MLR (mixed lymphocyte reaction) assays measuring interferon-gamma cytokine levels in culture supernatants (Wang et al., Cancer Immunol Res. 2014 September: 2(9):846-56), SEB (staphylococcal enterotoxin B) T cell stimulation assay (Wang et al., Cancer Immunol Res. 2014 September: 2(9):846-56), and anti-CD3 T cell stimulation assays (Li and Kurlander, J Transl Med. 2010: 8: 104).

[0410] In some embodiments, a variant PD-L1 polypeptide can in some embodiments increase or, in alternative embodiments, decrease IFN-gamma (interferon-gamma) expression in a primary T-cell assay relative to a wild-type PD-L1 control. In some embodiments, such activity may depend on whether the variant PD-L1 polypeptide is provided in a form for antagonist activity or in a form for agonist activity. In some embodiments, a variant PD-L1 polypeptide or immunomodulatory protein is an antagonist of the inhibitory receptor, such as blocks an inhibitory signal in the cell that may occur to decrease response to an activating stimuli, e.g. CD3 and/or CD28 costimulatory signal or a mitogenic signal. Those of skill will recognize that different formats of the primary T-cell assay used to determine an increase or decrease in IFN-gamma expression exist.

[0411] In assaying for the ability of a variant PD-L1 to increase or decrease IFN-gamma expression in a primary T-cell assay, a Mixed Lymphocyte Reaction (MLR) assay can be used. In some embodiments, a variant PD-L1 polypeptide or immunomodulatory protein provided in antagonist form, such as soluble form, e.g. variant PD-L1-Fc or secretable immunomodulatory protein, block activity of the PD-1 inhibitory receptor and thereby increase MLR activity in the assay, such as observed by increased production of IFN-gamma in the assay. In some embodiments, a variant PD-L1 polypeptide or immunomodulatory protein provided in agonist form, such as a localizing vIgD stack or conjugate containing a tumor-localizing moiety or an engineered cell expressing a transmembrane immunomodulatory protein as provided, may stimulate activity of the PD-1 inhibitory receptor and thereby decrease MLR activity, such as evidenced by decreased IFN-gamma production. In some embodiments, a variant PD-L1 polypeptide or immunomodulatory protein provided in agonist form, such as a localizing vIgD stack or conjugate containing a tumor-localizing moiety or an engineered cell expressing a transmembrane immunomodulatory protein as provided, may block activity of the PD-1 inhibitory receptor and thereby increase MLR activity, such as increase IFN-gamma production.

[0412] Alternatively, in assaying for the ability of a variant PD-L1 to modulate an increase or decrease IFN-gamma expression in a primary T-cell assay, a co-immobilization assay can be used. In a co-immobilization assay, a TCR signal, provided in some embodiments by anti-CD3 antibody, is used in conjunction with a co-immobilized variant PD-L1 to determine the ability to increase or decrease IFN-gamma expression relative to a PD-L1 unmodified or wild-type control. In some embodiments, a variant PD-L1 polypeptide or immunomodulatory protein, e.g. a co-immobilized variant PD-L1 (e.g., PD-L1-Fc), decreases IFN-gamma production in a co-immobilization assay.

[0413] In some embodiments, in assaying for the ability of a variant PD-L1 to modulate an increase or decrease IFN-gamma expression a T cell reporter assay can be used. In some embodiments, the T cell is a Jurkat T cell line or is derived from Jurkat T cell lines. In reporter assays, the reporter cell line (e.g. Jurkat reporter cell) also is generated to overexpress an inhibitory receptor that is the cognate binding partner of the variant IgSF domain polypeptide. For example, in the case of a variant PD-L1, the reporter cell line (e.g. Jurkat reporter cell) is generated to overexpress PD-1. In some embodiments, the reporter T cells also contain a reporter construct containing an inducible promoter responsive to T cell activation operably linked to a reporter. In some embodiments, the reporter is a fluorescent or luminescent reporter. In some embodiments, the reporter is luciferase. In some embodiments, the promoter is responsive to CD3 signaling. In some embodiments, the promoter is an NFAT promoter. In some embodiments, the promoter is responsive to costimulatory signaling, e.g. CD28 costimulatory signaling. In some embodiments, the promoter is an IL-2 promoter.

[0414] In aspects of a reporter assay, a reporter cell line is stimulated, such as by co-incubation with antigen presenting cells (APCs) expressing the wild-type ligand of the inhibitory receptor, e.g. PD-L1. In some embodiments, the APCs are artificial APCs. Artificial APCs are well known to a skilled artisan. In some embodiments, artificial APCs are derived from one or more mammalian cell line, such as K562, CHO or 293 cells.

[0415] In some embodiments, the Jurkat reporter cells are co-incubated with artificial APCs overexpressing the inhibitory ligand in the presence of the variant IgSF domain molecule or immunomodulatory protein, e.g., variant PD-L1 polypeptide or immunomodulatory protein. In some embodiments, reporter expression is monitored, such as by determining the luminescence or fluorescence of the cells. In some embodiments, normal interactions between its inhibitory receptor and ligand result in a repression of or decrease in the reporter signal, such as compared to control, e.g. reporter expression by co-incubation of control T cells and APCs in which the inhibitory receptor and ligand interaction is not present, e.g. APCs that do not overexpress PD-L1. In some embodiments, a variant PD-L1 polypeptide or immunomodulatory protein provided herein antagonizes the interaction, e.g. when provided in soluble form as a variant PD-L1-Fc or when expressed from the APC as a secretable immunomodulatory protein, thereby resulting in an increase in the reporter signal compared to the absence of the variant PD-L1 polypeptide or immunomodulatory protein. In some cases, certain formats of a variant PD-L1 polypeptide or immunomodulatory protein as provided herein may provide an agonist activity, thereby decreasing reporter expression compared to the absence of the variant PD-L1 polypeptide or immunomodulatory protein.

[0416] Use of proper controls is known to those of skill in the art, however, in the aforementioned embodiments, a control typically involves use of the unmodified PD-L1, such as a wild-type of native PD-L1 isoform from the same mammalian species from which the variant PD-L1 was derived or developed. In some embodiments, the wild-type or native PD-L1 is of the same form or corresponding form as the variant. For example, if the variant PD-L1 is a soluble form containing a variant ECD fused to an Fc protein, then the control is a soluble form containing the wild-type or native ECD of PD-L1 fused to the Fc protein. Irrespective of whether the binding affinity and/or selectivity to either one or more of PD-1 and CD80 is increased or decreased, a variant PD-L1 in some embodiments will increase IFN-gamma expression and, in alternative embodiments, decrease IFN-gamma expression in a T-cell assay relative to a wild-type PD-L1 control.

[0417] In some embodiments, a variant PD-L1 polypeptide or immunomodulatory protein, increases IFN-gamma expression (i.e., protein expression) relative to a wild-type or unmodified PD-L1 control by at least: 5%, 10%, 20%, 30%, 40%, 50%, 60%, 70%, 80%, 90%, or higher. In other embodiments, a variant PD-L1 or immunomodulatory protein decreases IFN-gamma expression (i.e. protein expression) relative to a wild-type or unmodified PD-L1 control by at least: 5%, 10%, 20%, 30%, 40%, 50%, 60%, 70%, 80%, 90%, or higher. In some embodiments, the wild-type PD-L1 control is murine PD-L1, such as would typically be used for a variant PD-L1 altered in sequence from that of a wild-type murine PD-L1 sequence. In some embodiments, the wild-type PD-L1 control is human PD-L1, such as would typically be used for a variant PD-L1 altered in sequence from that of a wild-type human PD-L1 sequence such as an PD-L1 sequence comprising the sequence of amino acids of SEQ ID NO: 30 or 1728, or SEQ ID NO: 55 or 309.

### V. PHARMACEUTICAL FORMULATIONS

[0418] Provided herein are compositions containing any of the variant PD-L1 polypeptides, immunomodulatory proteins, conjugates, engineered cells or infectious agents described herein. The pharmaceutical composition can further comprise a pharmaceutically acceptable excipient. For example, the pharmaceutical composition can contain one or more excipients for modifying, maintaining or preserving, for example, the pH, osmolarity, viscosity, clarity, color, isotonicity, odor, sterility, stability, rate of dissolution or release, adsorption, or penetration of the composition. In some aspects, a skilled artisan understands that a pharmaceutical composition containing cells may differ from a pharmaceutical composition containing a protein.

[0419] In some embodiments, the pharmaceutical composition is a solid, such as a powder, capsule, or tablet. For example, the components of the pharmaceutical composition can be lyophilized. In some embodiments, the solid pharmaceutical composition is reconstituted or dissolved in a liquid prior to administration.

[0420] In some embodiments, the pharmaceutical composition is a liquid, for example variant PD-L1 polypeptides dissolved in an aqueous solution (such as physiological saline or Ringer's solution). In some embodiments, the pH of the pharmaceutical composition is between about 4.0 and about 8.5 (such as between about 4.0 and about 5.0, between about 4.5 and about 5.5, between about 5.0 and about 6.0, between about 5.5 and about 6.5, between about 6.0 and about 7.0, between about 6.5 and about 7.5, between about 7.0 and about 8.0, or between about 7.5 and about 8.5).

[0421] In some embodiments, the pharmaceutical composition comprises a pharmaceutically-acceptable excipient, for example a filler, binder, coating, preservative, lubricant, flavoring agent, sweetening agent, coloring agent, a solvent, a buffering agent, a chelating agent, or stabilizer. Examples of pharmaceutically-acceptable fillers include cellulose, dibasic calcium phosphate, calcium carbonate, microcrystalline cellulose, sucrose, lactose, glucose, mannitol, sorbitol, maltol, pregelatinized starch, corn starch, or potato starch. Examples of pharmaceutically-acceptable binders include polyvinylpyrrolidone, starch, lactose, xylitol, sorbitol, maltitol, gelatin, sucrose, polyethylene glycol, methyl cellulose, or cellulose. Examples of pharmaceutically-acceptable coatings include hydroxypropyl methylcellulose (HPMC), shellac, corn protein zein, or gelatin. Examples of pharmaceutically-acceptable disintegrants include polyvinylpyrrolidone, carboxymethyl cellulose, or sodium starch glycolate. Examples of pharmaceutically-acceptable lubricants include polyethylene glycol, magnesium stearate, or stearic acid. Examples of pharmaceutically-acceptable preservatives include methyl parabens, ethyl parabens, propyl paraben, benzoic acid, or sorbic acid. Examples of pharmaceutically-acceptable sweetening agents include sucrose, saccharine, aspartame, or sorbitol. Examples of pharmaceutically-acceptable buffering agents include carbonates, citrates, gluconates, acetates, phosphates, or tartrates.

[0422] In some embodiments, the pharmaceutical composition further comprises an agent for the controlled or sustained release of the product, such as injectable microspheres, bio-erodible particles, polymeric compounds (polylactic acid, polyglycolic acid), beads, or liposomes.

[0423] In some embodiments, the pharmaceutical composition is sterile. Sterilization may be accomplished by filtration through sterile filtration membranes or radiation. Where the composition is lyophilized, sterilization using this method may be conducted either prior to or following lyophilization and reconstitution. The composition for parenteral administration may be stored in lyophilized form or in solution. In addition, parenteral compositions generally are placed into a container having a sterile access port, for example, an intravenous solution bag or vial having a stopper pierceable by a hypodermic injection needle.

[0424] In some embodiments, provided are pharmaceutical compositions containing the transmembrane immunomodulatory proteins, including engineered cells expressing such transmembrane immunomodulatory proteins. In some embodiments, the pharmaceutical compositions and formulations include one or more optional pharmaceutically acceptable carrier or excipient. Such compositions may comprise buffers such as neutral buffered saline, phosphate buffered saline and the like; carbohydrates such as glucose, mannose, sucrose or dextrans, mannitol; proteins; polypeptides or amino acids such as glycine; antioxidants; chelating agents such as EDTA or glutathione; adjuvants (e.g., aluminum hydroxide); and preservatives. Compositions of the present invention are preferably formulated for intravenous administration.

[0425] Such a formulation may, for example, be in a form suitable for intravenous infusion. A pharmaceutically acceptable carrier may be a pharmaceutically acceptable material, composition, or vehicle that is involved in carrying or transporting cells of interest from one tissue, organ, or portion of the body to another tissue, organ, or portion of the body. For example, the carrier may be a liquid or solid filler, diluent, excipient, solvent, or encapsulating material, or some combination thereof. Each component of the carrier must be “pharmaceutically acceptable” in that it must be compatible with the other ingredients of the formulation. It also must be suitable for contact with any tissue, organ, or portion of the body that it may encounter, meaning that it must not carry a risk of toxicity, irritation, allergic response, immunogenicity, or any other complication that excessively outweighs its therapeutic benefits.

### VI. ARTICLES OF MANUFACTURE AND KITS

[0426] Also provided herein are articles of manufacture comprising the pharmaceutical compositions described herein in suitable packaging. Suitable packaging for compositions (such as ophthalmic compositions) described herein are known in the art, and include, for example, vials (such as sealed vials), vessels, ampules, bottles, jars, flexible packaging (e.g., sealed Mylar or plastic bags), and the like. These articles of manufacture may further be sterilized and/or sealed.

[0427] Further provided are kits comprising the pharmaceutical compositions (or articles of manufacture) described herein, which may further comprise instruction(s) on methods of using the composition, such as uses described herein. The kits described herein may also include other materials desirable from a commercial and user standpoint, including other buffers, diluents, filters, needles, syringes, and package inserts with instructions for performing any methods described herein.

### VII. THERAPEUTIC APPLICATIONS

[0428] Provided herein are methods using the provided pharmaceutical compositions containing a variant PD-L1 polypeptide, immunomodulatory protein, conjugate engineered cell or infectious agent described herein, for modulating an immune response, including in connection with treating a disease or condition in a subject, such as in a human patient. The pharmaceutical compositions described herein (including pharmaceutical composition comprising the variant PD-L1 polypeptides, the immunomodulatory proteins, the conjugates, the engineered cells and the infectious agents described herein) can be used in a variety of therapeutic applications, such as the treatment of a disease. For example, in some embodiments the pharmaceutical composition is used to treat inflammatory or autoimmune disorders, cancer, organ transplantation, viral infections, and/or bacterial infections in a mammal. The pharmaceutical composition can modulate (e.g. increase or decrease) an immune response to treat the disease.

[0429] In some embodiments, the provided methods are applicable to therapeutic administration of variant PD-L1 polypeptides, the immunomodulatory proteins, the conjugates, the engineered cells and infectious agents described herein. It is within the level of a skilled artisan, in view of the provided disclosure, to choose a format for the indication depending on the type of modulation of the immune response, e.g. increase or decrease that is desired.

[0430] In some embodiments, a pharmaceutical composition provided herein that stimulates the immune response is administered, which can be useful, for example, in the treatment of cancer, viral infections, or bacterial infections. In some embodiments, the pharmaceutical composition contains a variant PD-L1 polypeptide in a format that exhibits antagonist activity of its cognate binding partner PD-1 and/or that inhibits costimulatory signaling via PD-1. Exemplary formats of PD-L1 polypeptide for use in connection with such therapeutic applications include, for example, a variant PD-L1 polypeptide that is soluble (e.g. variant PD-L1-Fc fusion protein), an immunomodulatory protein or “stack” of a variant PD-L1 polypeptide and another IgSF domain, including soluble forms thereof that are Fc fusions, an engineered cell expressing a secretable immunomodulatory protein, or an infectious agent comprising a nucleic acid molecule encoding a secretable immunomodulatory protein, such as for expression and secretion of the secretable immunomodulatory protein in an infected cell (e.g. tumor cell or APC, e.g. dendritic cell). Among such methods are methods carried out by delivery of a variant PD-L1 polypeptide in a soluble format. Exemplary soluble formats are described herein, including formats in which an extracellular portion of a variant PD-L1 polypeptide containing an affinity modified IgSF domain (e.g. IgV) is linked, directly or indirectly, to a multimerization domain, e.g. an Fc domain or region. In some embodiments, such a therapeutic agent is a variant PD-L1-Fc fusion protein.

[0431] The provided methods to modulate an immune response can be used to treat a disease or condition, such as a tumor or cancer. In some embodiments, the pharmaceutical composition can be used to inhibit growth of mammalian cancer cells (such as human cancer cells). A method of treating cancer can include administering an effective amount of any of the pharmaceutical compositions described herein to a subject with cancer. The effective amount of the pharmaceutical composition can be administered to inhibit, halt, or reverse progression of cancers, including cancers that are sensitive to modulation of immunological activity, such as by the provided variants or immunomodulatory proteins. Human cancer cells can be treated in vivo, or ex vivo. In ex vivo treatment of a human patient, tissue or fluids containing cancer cells are treated outside the body and then the tissue or fluids are reintroduced back into the patient. In some embodiments, the cancer is treated in a human patient in vivo by administration of the therapeutic composition into the patient. Thus, the present invention provides ex vivo and in vivo methods to inhibit, halt, or reverse progression of the tumor, or otherwise result in a statistically significant increase in progression-free survival (i.e., the length of time during and after treatment in which a patient is living with cancer that does not get worse), or overall survival (also called “survival rate;” i.e., the percentage of people in a study or treatment group who are alive for a certain period of time after they were diagnosed with or treated for cancer) relative to treatment with a control.

[0432] The cancers that can be treated by the pharmaceutical compositions and the treatment methods described herein include, but are not limited to, melanoma, bladder cancer, hematological malignancies (leukemia, lymphoma, myeloma), liver cancer, brain cancer, renal cancer, breast cancer, pancreatic cancer (adenocarcinoma), colorectal cancer, lung cancer (small cell lung cancer and non-small-cell lung cancer), spleen cancer, cancer of the thymus or blood cells (i.e., leukemia), prostate cancer, testicular cancer, ovarian cancer, uterine cancer, a musculoskeletal cancer, a head and neck cancer, a gastrointestinal cancer, a germ cell cancer, or an endocrine and neuroendocrine cancer. In some embodiments, the cancer is Ewing's sarcoma. In some embodiments, the cancer is selected from melanoma, lung cancer, bladder cancer, and a hematological malignancy. In some embodiments, the cancer is a lymphoma, lymphoid leukemia, myeloid leukemia, cervical cancer, neuroblastoma, or multiple myeloma.

[0433] In some embodiments, the pharmaceutical composition is administered as a monotherapy (i.e., as a single agent) or as a combination therapy (i.e., in combination with one or more additional anticancer agents, such as a chemotherapeutic drug, a cancer vaccine, or an immune checkpoint inhibitor. In some embodiments, the pharmaceutical composition can also be administered with radiation therapy. In some aspects of the present disclosure, the immune checkpoint inhibitor is nivolumab, tremelimumab, pembrolizumab, ipilimumab, or the like.

[0434] In some embodiments, the pharmaceutical composition suppresses an immune response, which can be useful in the treatment of inflammatory or autoimmune disorders, or organ transplantation. In some embodiments, the pharmaceutical composition contains a variant PD-L1 polypeptide in a format that exhibits agonist activity of its cognate binding partner PD-1 and/or that stimulates inhibitory signaling via PD-1. In some aspects, the variant PD-L1 polypeptide stimulates an inhibitory signal through CD80, such as expressed on a lymphocyte or APC. Exemplary formats of a PD-L1 polypeptide for use in connection with such therapeutic applications include, for example, an immunomodulatory protein or “stack” of a variant PD-L1 polypeptide and an IgSF domain or variant thereof that localizes to a cell or tissue of an inflammatory environment, a conjugate containing a variant PD-L1 polypeptide linked to a moiety that localizes to a cell or tissue of an inflammatory environment, an engineered cell expressing a transmembrane immunomodulatory protein, or an infectious agent comprising a nucleic acid molecule encoding a transmembrane immunomodulatory protein, such as for expression of the transmembrane immunomodulatory protein in an infected cell.

[0435] The provided methods to modulate an immune response can be used to treat a disease or condition, such as an inflammatory or autoimmune disorder. In some embodiments, the inflammatory or autoimmune disorder is antineutrophil cytoplasmic antibodies (ANCA)-associated vasculitis, a vasculitis, an autoimmune skin disease, transplantation, a Rheumatic disease, an inflammatory gastrointestinal disease, an inflammatory eye disease, an inflammatory neurological disease, an inflammatory pulmonary disease, an inflammatory endocrine disease, or an autoimmune hematological disease.

[0436] In some embodiments, the inflammatory and autoimmune disorders that can be treated by the pharmaceutical composition described herein is Addison's Disease, allergies, alopecia areata, Alzheimer's, antineutrophil cytoplasmic antibodies (ANCA)-associated vasculitis, ankylosing spondylitis, antiphospholipid syndrome (Hughes Syndrome), asthma, atherosclerosis, rheumatoid arthritis, autoimmune hemolytic anemia, autoimmune hepatitis, autoimmune inner ear disease, autoimmune lymphoproliferative syndrome, autoimmune myocarditis, autoimmune oophoritis, autoimmune orchitis, azoospermia, Behcet's Disease, Berger's Disease, bullous pemphigoid, cardiomyopathy, cardiovascular disease, celiac Sprue/coeliac disease, chronic fatigue immune dysfunction syndrome (CFIDS), chronic idiopathic polyneuritis, chronic inflammatory demyelinating, polyradicalneuropathy (CIDP), chronic relapsing polyneuropathy (Guillain-Barré syndrome), Churg-Strauss Syndrome (CSS), cicatricial pemphigoid, cold agglutinin disease (CAD), COPD (chronic obstructive pulmonary disease), CREST syndrome, Crohn's disease, dermatitis, herpetiformus, dermatomyositis, diabetes, discoid lupus, eczema, epidermolysis bullosa acquisita, essential mixed cryoglobulinemia, Evan's Syndrome, exopthalmos, fibromyalgia, Goodpasture's Syndrome, Graves' Disease, Hashimoto's thyroiditis, idiopathic pulmonary fibrosis, idiopathic thrombocytopenia purpura (ITP), IgA nephropathy, immunoproliferative disease or disorder, inflammatory bowel disease (IBD), interstitial lung disease, juvenile arthritis, juvenile idiopathic arthritis (JIA), Kawasaki's Disease, Lambert-Eaton Myasthenic Syndrome, lichen planus, lupus nephritis, lymphocytic hypophysitis, Ménière's Disease, Miller Fish Syndrome/acute disseminated encephalomyeloradiculopathy, mixed connective tissue disease, multiple sclerosis (MS), muscular rheumatism, myalgic encephalomyelitis (ME), myasthenia gravis, ocular inflammation, pemphigus foliaceus, pemphigus vulgaris, pernicious anaemia, polyarteritis nodosa, polychondritis, polyglandular syndromes (Whitaker's syndrome), polymyalgia rheumatica, polymyositis, primary agammaglobulinemia, primary biliary cirrhosis/autoimmune cholangiopathy, psoriasis, psoriatic arthritis, Raynaud's Phenomenon, Reiter's Syndrome/reactive arthritis, restenosis, rheumatic fever, rheumatic disease, sarcoidosis, Schmidt's syndrome, scleroderma, Sjörgen's Syndrome, stiff-man syndrome, systemic lupus erythematosus (SLE), systemic scleroderma, Takayasu arteritis, temporal arteritis/giant cell arteritis, thyroiditis, Type 1 diabetes, ulcerative colitis, uveitis, vasculitis, vitiligo, interstitial bowel disease or Wegener's Granulomatosis. In some embodiments, the inflammatory or autoimmune disorder is selected from interstitial bowel disease, transplant, Crohn's disease, ulcerative colitis, multiple sclerosis, asthma, rheumatoid arthritis, and psoriasis.

[0437] In some embodiments, the pharmaceutical composition is administered to modulate an autoimmune condition. For example, suppressing an immune response can be beneficial in methods for inhibiting rejection of a tissue, cell, or organ transplant from a donor by a recipient. Accordingly, in some embodiments, the pharmaceutical compositions described herein are used to limit or prevent graft-related or transplant related diseases or disorders, such as graft versus host disease (GVHD). In some embodiments, the pharmaceutical compositions are used to suppress autoimmune rejection of transplanted or grafted bone marrow, organs, skin, muscle, neurons, islets, or parenchymal cells.

[0438] Pharmaceutical compositions comprising engineered cells and the methods described herein can be used in adoptive cell transfer applications. In some embodiments, cell compositions comprising engineered cells can be used in associated methods to, for example, modulate immunological activity in an immunotherapy approach to the treatment of, for example, a mammalian cancer or, in other embodiments the treatment of autoimmune disorders. The methods employed generally comprise a method of contacting a TIP of the present invention with a mammalian cell under conditions that are permissive to specific binding of the affinity modified IgSF domain and modulation of the immunological activity of the mammalian cell. In some embodiments, immune cells (such as tumor infiltrating lymphocytes (TILs), T-cells (including CD8+ or CD4+ T-cells), or APCs) are engineered to express as a membrane protein and/or as a soluble variant PD-L1 polypeptide, immunomodulatory protein, or conjugate as described herein. The engineered cells can then be contact a mammalian cell, such as an APC, a second lymphocyte or tumor cell in which modulation of immunological activity is desired under conditions that are permissive of specific binding of the affinity modified IgSF domain to a counter-structure on the mammalian cell such that immunological activity can be modulated in the mammalian cell. Cells can be contacted in vivo or ex vivo.

[0439] In some embodiments, the engineered cells are autologous cells. In other embodiments, the cells are allogeneic. In some embodiments, the cells are autologous engineered cells reinfused into the mammal from which it was isolated. In some embodiments, the cells are allogenic engineered cells infused into the mammal. In some embodiments, the cells are harvested from a patient's blood or tumor, engineered to express a polypeptide (such as the variant PD-L1 polypeptide, immunomodulatory protein, or conjugate as described herein), expanded in an in vitro culture system (for example, by stimulating the cells), and reinfused into the patient to mediate tumor destruction. In some embodiments, the methods is conducted by adoptive cell transfer wherein cells expressing the TIP (e.g., a T-cell) are infused back into the patient. In some embodiments, the therapeutic compositions and methods of the invention are used in the treatment of a mammalian patient of cancers such as lymphoma, lymphoid leukemia, myeloid leukemia, cervical cancer, neuroblastoma, or multiple myeloma.

[0440] In some embodiments, the pharmaceutical composition is administered to a subject. In some embodiments, the subject is a human patient. Generally, dosages and routes of administration of the pharmaceutical composition are determined according to the size and condition of the subject, according to standard pharmaceutical practice. For example, the therapeutically effective dose can be estimated initially either in cell culture assays or in animal models such as mice, rats, rabbits, dogs, pigs, or monkeys. An animal model may also be used to determine the appropriate concentration range and route of administration. Such information can then be used to determine useful doses and routes for administration in humans. The exact dosage will be determined in light of factors related to the subject requiring treatment. Dosage and administration are adjusted to provide sufficient levels of the active compound or to maintain the desired effect. Factors that may be taken into account include the severity of the disease state, the general health of the subject, the age, weight, and gender of the subject, time and frequency of administration, drug combination(s), reaction sensitivities, and response to therapy.

[0441] Long-acting pharmaceutical compositions may be administered every 3 to 4 days, every week, or biweekly depending on the half-life and clearance rate of the particular formulation. The frequency of dosing will depend upon the pharmacokinetic parameters of the molecule in the formulation used. Typically, a composition is administered until a dosage is reached that achieves the desired effect. The composition may therefore be administered as a single dose, or as multiple doses (at the same or different concentrations/dosages) over time, or as a continuous infusion. Further refinement of the appropriate dosage is routinely made. Appropriate dosages may be ascertained through use of appropriate dose-response data. A number of biomarkers or physiological markers for therapeutic effect can be monitored including T cell activation or proliferation, cytokine synthesis or production (e.g., production of TNF-α, IFN-γ, IL-2), induction of various activation markers (e.g., CD25, IL-2 receptor), inflammation, joint swelling or tenderness, serum level of C-reactive protein, anti-collagen antibody production, and/or T cell-dependent antibody response(s).

[0442] In some embodiments, the pharmaceutical composition is administered to a subject through any route, including orally, transdermally, by inhalation, intravenously, intra-arterially, intramuscularly, direct application to a wound site, application to a surgical site, intraperitoneally, by suppository, subcutaneously, intradermally, transcutaneously, by nebulization, intrapleurally, intraventricularly, intra-articularly, intraocularly, or intraspinally.

[0443] In some embodiments, the dosage of the pharmaceutical composition is a single dose or a repeated dose. In some embodiments, the doses are given to a subject once per day, twice per day, three times per day, or four or more times per day. In some embodiments, about 1 or more (such as about 2 or more, about 3 or more, about 4 or more, about 5 or more, about 6 or more, or about 7 or more) doses are given in a week. In some embodiments, multiple doses are given over the course of days, weeks, months, or years. In some embodiments, a course of treatment is about 1 or more doses (such as about 2 or more does, about 3 or more doses, about 4 or more doses, about 5 or more doses, about 7 or more doses, about 10 or more doses, about 15 or more doses, about 25 or more doses, about 40 or more doses, about 50 or more doses, or about 100 or more doses).

[0444] In some embodiments, an administered dose of the pharmaceutical composition is about 1 μg of protein per kg subject body mass or more (such as about 2 μg of protein per kg subject body mass or more, about 5 μg of protein per kg subject body mass or more, about 10 μg of protein per kg subject body mass or more, about 25 μg of protein per kg subject body mass or more, about 50 μg of protein per kg subject body mass or more, about 100 μg of protein per kg subject body mass or more, about 250 μg of protein per kg subject body mass or more, about 500 μg of protein per kg subject body mass or more, about 1 mg of protein per kg subject body mass or more, about 2 mg of protein per kg subject body mass or more, or about 5 mg of protein per kg subject body mass or more).

[0445] In some embodiments, a therapeutic amount of a cell composition is administered. Typically, precise amount of the compositions of the present invention to be administered can be determined by a physician with consideration of individual differences in age, weight, tumor size, extent of infection or metastasis, and condition of the patient (subject). It can generally be stated that a pharmaceutical composition comprising engineered cells, e.g. T cells, as described herein may be administered at a dosage of 10⁴ to 10⁹ cells/kg body weight, such as 10⁵ to 10⁶ cells/kg body weight, including all integer values within those ranges. Engineered cell compositions, such as T cell compositions, may also be administered multiple times at these dosages. The cells can be administered by using infusion techniques that are commonly known in immunotherapy (see, e.g., Rosenberg et al, New Eng. J. of Med. 319: 1676, 1988). The optimal dosage and treatment regime for a particular patient can readily be determined by one skilled in the art of medicine by monitoring the patient for signs of disease and adjusting the treatment accordingly.

[0446] In some embodiments, the pharmaceutical composition contains infectious agents containing nucleic acid sequences encoding the immunomodulatory variant polypeptides. In some embodiments, the pharmaceutical composition contains a dose of infectious agents suitable for administration to a subject that is suitable for treatment. In some embodiments, the pharmaceutical composition contains an infectious agent that is a virus, at a single or multiple dosage amount, of between about between or between about 1×10⁵ and about 1×10¹² plaque-forming units (pfu), 1×10⁶ and 1×10¹⁰ pfu, or 1×10⁷ and 1×10¹⁰ pfu, each inclusive, such as at least or at least about or at about 1×10⁶, 1×10⁷, 1×10⁸, 1×10⁹, 2×10⁹, 3×10⁹, 4×10⁹, 5×10⁹ pfu or about 1×10¹⁰ pfu. In some embodiments, the pharmaceutical composition can contain a virus concentration of from or from about 10⁵ to about 10¹⁰ pfu/mL, for example, 5×10⁶ to 5×10⁹ or 1×10⁷ to 1×10⁹ pfu/mL, such as at least or at least about or at about 10⁶ pfu/mL, 10⁷ pfu/mL, 10⁸ pfu/mL or 10⁹ pfu/mL. In some embodiments, the pharmaceutical composition contains an infectious agent that is a bacterium, at a single or multiple dosage amount, of between about between or between about 1×10³ and about 1×10⁹ colony-forming units (cfu), 1×10⁴ and 1×10⁹ cfu, or 1×10⁵ and 1×10⁷ cfu, each inclusive, such as at least or at least about or at about 1×10⁴, 1×10⁵, 1×10⁶, 1×10⁷, 1×10⁸ or 1×10⁹ cfu. In some embodiments, the pharmaceutical composition can contain a bacterial concentration of from or from about 10³ to about 10⁸ cfu/mL, for example, 5×10⁵ to 5×10⁷ or 1×10⁶ to 1×10⁷ cfu/mL, such as at least or at least about or at about 10⁵ cfu/mL, 10⁶ cfu/mL, 10⁷ cfu/mL or 10⁸ cfu/mL.

[0447] A variety of means are known for determining if administration of a therapeutic composition of the invention sufficiently modulates immunological activity by eliminating, sequestering, or inactivating immune cells mediating or capable of mediating an undesired immune response; inducing, generating, or turning on immune cells that mediate or are capable of mediating a protective immune response; changing the physical or functional properties of immune cells; or a combination of these effects. Examples of measurements of the modulation of immunological activity include, but are not limited to, examination of the presence or absence of immune cell populations (using flow cytometry, immunohistochemistry, histology, electron microscopy, polymerase chain reaction (PCR)); measurement of the functional capacity of immune cells including ability or resistance to proliferate or divide in response to a signal (such as using T-cell proliferation assays and pepscan analysis based on 3H-thymidine incorporation following stimulation with anti-CD3 antibody, anti-T-cell receptor antibody, anti-CD28 antibody, calcium ionophores, PMA (phorbol 12-myristate 13-acetate) antigen presenting cells loaded with a peptide or protein antigen; B cell proliferation assays); measurement of the ability to kill or lyse other cells (such as cytotoxic T cell assays); measurements of the cytokines, chemokines, cell surface molecules, antibodies and other products of the cells (e.g., by flow cytometry, enzyme-linked immunosorbent assays, Western blot analysis, protein microarray analysis, immunoprecipitation analysis); measurement of biochemical markers of activation of immune cells or signaling pathways within immune cells (e.g., Western blot and immunoprecipitation analysis of tyrosine, serine or threonine phosphorylation, polypeptide cleavage, and formation or dissociation of protein complexes; protein array analysis; DNA transcriptional, profiling using DNA arrays or subtractive hybridization); measurements of cell death by apoptosis, necrosis, or other mechanisms (e.g., annexin V staining, TUNEL assays, gel electrophoresis to measure DNA laddering, histology; fluorogenic caspase assays, Western blot analysis of caspase substrates); measurement of the genes, proteins, and other molecules produced by immune cells (e.g., Northern blot analysis, polymerase chain reaction, DNA microarrays, protein microarrays, 2-dimensional gel electrophoresis, Western blot analysis, enzyme linked immunosorbent assays, flow cytometry); and measurement of clinical symptoms or outcomes such as improvement of autoimmune, neurodegenerative, and other diseases involving self-proteins or self-polypeptides (clinical scores, requirements for use of additional therapies, functional status, imaging studies) for example, by measuring relapse rate or disease severity (using clinical scores known to the ordinarily skilled artisan) in the case of multiple sclerosis, measuring blood glucose in the case of type I diabetes, or joint inflammation in the case of rheumatoid arthritis.

### VIII. EXEMPLARY EMBODIMENTS

[0448] Among the provided embodiments are:

[0449] 1. A variant PD-L1 polypeptide, comprising an ECD or IgV domain or a specific binding fragment thereof, an IgC domain or a specific binding fragment thereof, or both, wherein the variant PD-L1 polypeptide comprises one or more amino acid modifications in an unmodified PD-L1 or a specific binding fragment thereof corresponding to position(s) selected from 6, 10, 11, 14, 15, 16, 17, 18, 19, 20, 22, 23, 26, 27, 28, 33, 35, 36, 40, 41, 43, 44, 45, 46, 47, 49, 50, 51, 52, 53, 54, 55, 56, 57, 58, 60, 64, 65, 68, 71, 72, 73, 74, 75, 78, 79, 83, 85, 89, 90, 93, 97, 98, 99, 101, 102, 103, 104, 106, 110, 111, 112, 113, 117, 119, 120, 121, 124, 129, 130, 131, 134, 137, 138, 144, 148, 149, 150, 155, 158, 160, 163, 165, 167, 170, 171, 173, 175, 176, 177, 179, 180, 183, 185, 188, 189, 192, 193, 194, 195, 196, 197, 198, 199, 200, 201, 202, 203, 204, 206, 207, 213, or 221, with reference to the numbering of SEQ ID NO:30 or 1728.

[0450] 2. The variant PD-L1 polypeptide of embodiment 1, wherein the amino acid modification is an amino acid substitution, insertion or deletion.

[0451] 3. The variant PD-L1 polypeptide of embodiment 1 or embodiment 2, wherein the unmodified PD-L1 is a mammalian PD-L1 or a specific binding fragment thereof.

[0452] 4. The variant PD-L1 polypeptide of embodiment 3, wherein the unmodified PD-L1 is a human PD-L1 or a specific binding fragment thereof.

[0453] 5. The variant PD-L1 polypeptide of any one of embodiments 1-4, wherein the unmodified PD-L1 comprises (i) the sequence of amino acids set forth in SEQ ID NO:30 or 1728, (ii) a sequence of amino acids that has at least 95% sequence identity to SEQ ID NO:30 or 1728; or (iii) a portion thereof comprising an IgV domain or IgC domain or specific binding fragments thereof or both.

[0454] 6. The variant PD-L1 polypeptide of any one of embodiments 1-5, wherein:

[0455] the specific binding fragment of the IgV domain or IgC domain has a length of at least 50, 60, 70, 80, 90, 100, 110 or more amino acids; or

[0456] the specific binding fragment of the IgV domain comprises a length that is at least 80% of the length of the IgV domain set for as amino acids 24-130 of SEQ ID NO:3 and/or the specific binding fragment of the IgC domain comprises a length that is at least 80% of the length of the IgC domain set forth as amino acids 133-225 of SEQ ID NO:3.

[0457] 7. The variant PD-L1 polypeptide of any one of embodiments 1-6, wherein:

[0458] the variant PD-L1 comprises up to 1, 2, 3, 4, 5, 6, 7, 8, 9, 10, 11, 12, 13, 14, 15, 16, 17, 18, 19 or 20 amino acid modifications, optionally amino acid substitutions, insertions and/or deletions; or

[0459] the variant PD-L1 polypeptide comprises a sequence of amino acids that exhibits at least 85%, 86%, 87%, 88%, 89%, 90%, 91%, 92%, 93%, 94%, 95%, 96%, 97%, 98% or 99% sequence identity to SEQ ID NO:30 or 1728 or a specific binding fragment thereof.

[0460] 8. The variant PD-L1 polypeptide of any of embodiments 1-7, wherein the variant PD-L1 polypeptide exhibits altered binding to the ectodomain of PD-1 or CD80 compared to the unmodified PD-L1.

[0461] 9. The variant PD-L1 polypeptide of any of embodiments 1-8, wherein:

[0462] the variant PD-L1 polypeptide exhibits altered binding to the ectodomain of PD-1 compared to the binding of the unmodified PD-L1 to the ectodomain of PD-1; and/or

[0463] the variant PD-L1 polypeptide exhibits altered binding to the ectodomain of CD80 compared to the binding of the unmodified PD-L1 to the ectodomain of CD80.

[0464] 10. The variant PD-L1 polypeptide of embodiment 8 or embodiment 9, wherein the altered binding is altered binding affinity and/or altered binding selectivity.

[0465] 11. The variant PD-L1 polypeptide of any of embodiments 1-10, wherein the one or more amino acid modifications are selected from P6S, Y10F, V11A, V11E, Y14S, G15A, S16G, N17D, M18I, M18T, M18V, T19A, T19I, I20L, C22R, K23E, K23N, K23R, E26A, E27D, E27G, K28E, K28I, K28R, K28N, A33D, L35P, I36S, I36T, E40G, M41K, M41V, D43G, D43V, K44E, N45D, N45I, N45T, I47T, I46V, F49S, V50A, H51N, H51R, H51Y, G52R, G52V, E53G, E53V, E54G, D55G, D55N, D55S, D55V, L56Q, K57E, K57R, V58A, V58D, H60R, S75P, R64S, Q65L, R68L, K71E, D72G, Q73R, L74P, S75P, N78I, N78S, A79T, I83T, D85E, Q89R, D90G, V93E, M97I, M97K, M97L, I98L, I98T, I98V, S99G, G101D, G101G-ins (G101GG), G102D, A103V, D104G, K106E, K106R, V110M, K111E, K111T, V112A, N113Y, N117S, I119T, N120S, Q121L, L124S, V129A, V129D, T130A, S131F, E134G, C137R, Q138R, K144E, K144Q, I148V, W149R, T150A, Q155H, S158G, K160M, T163I, K163N, N165Y, K167R, K167T, E170G, K171R, F173I, F173L, K173Y, V175A, T176N, S177C, L179P, R180S, T183A, T183I, T185A, I188V, F189L, F189S, T192S, F193S, R194G, R194W, R195G, R195S, R195T, L196S, D197G, P198S, P198T, E199G, E200K, E200N, N201D, N201Y, H202Q, T203A, A204T, L206F, V207A, L213P, T221L or a conservative amino acid substitution thereof.

[0466] 12. The variant PD-L1 polypeptide of any of embodiments 1-11, wherein the one or more amino acid modifications are selected from among K28N/M41V/N45T/H51N/K57E I20L/I36T/N45D/I47T, I20L/M41K/K44E, P6S/N45T/N78I/I83T, N78I, M41K/N78I, N45T/N78I, I20L/N45T, N45T, M41K, I20L/I36T/N45D, N17D/N47T/V50A/D72G, I20L/F49S, N45T/V50A, I20L/N45T/N78I, I20L/N45T/V50A, M41V/N45T, M41K/N45T, A33D/S75P/D85E, M18I/M41K/D43G/H51R/N78I, V11E/I20L/I36T/N45D/H60R/S75P, A33D/V50A, S16G/A33D/K71E/S75P, E27G/N45T/M97I, E27G/N45T/K57R, A33D/E53V, D43G/N45D/V58A, E40G/D43V/N45T/V50A, Y14S/K28E/N45T, A33D/N78S, A33D/N78I, A33D/N45T, A33D/N45T/N78I, E27G/N45T/V50A, N45T/V50A/N78S, I20L/N45T/V110M, I20L/I36T/N45T/V50A, N45T/L74P/S75P, N45T/S75P, S75P/K106R, S75P, A33D/S75P, A33D/S75P/D104G, A33D/S75P, I20L/E27G/N45T/V50A, I20L/E27G/D43G/N45D/V58A/N78I, I20L/D43G/N45D/V58A/N78I, I20L/A33D/D43G/N45D/V58A/N78I, I20L/D43G/N45D/N78I, E27G/N45T/V50A/N78I, N45T/V50A/N78I, V11A/I20L/E27G/D43G/N45D/H51Y/S99G, I20L/E27G/D43G/N45T/V50A, I20L/K28E/D43G/N45D/V58A/Q89R, I20L/I36T/N45D, I20L/K28E/D43G/N45D/E53G/V58A/N78I, A33D/D43G/N45D/V58A/S75P, K23R/D43G/N45D, I20L/D43G/N45D/V58A/N78I/D90G/G101D, D43G/N45D/L56Q/V58A/G101G-ins (G101GG), I20L/K23E/D43G/N45D/V58A/N78I, I20L/K23E/D43G/N45D/V50A/N78I, T19I/E27G/N45I/V50A/N78I/M97K, I20L/M41K/D43G/N45D, K23R/N45T/N78I, I20L/K28E/D43G/N45D/V58A/Q89R/G101G-ins (G101GG), K57R/S99G, K57R/S99G/F189L, M18V/M97L/F193S/R195G/E200K/H202Q, I36S/M41K/M97L/K144Q/R195G/E200K/H202Q/L206F, C22R/Q65L/L124S/K144Q/R195G/E200N/H202Q/T221L, M18V/I98L/L124S/P198T/L206F, S99G/N117S/I148V/K171R/R180S, I36T/M97L/A103V/Q155H, K28I/S99G, R195S, A79T/S99G/T185A/R195G/E200K/H202Q/L206F, K57R/S99G/L124S/K144Q, K57R/S99G/R195G, D55V/M97L/S99G, E27G/I36T/D55N/M97L/K111E, E54G/M97L/S99G, G15A/I36T/M97L/K111E/H202Q, G15A/I36T/V129D, G15A/I36T/V129D/R195G, G15A/V129D, I36S/M97L, I36T/D55N/M97L/K111E/A204T, I36T/D55N/M97L/K111E/V129A/F173L, I36T/D55S/M97L/K111E/I148V/R180S, I36T/G52R/M97L/V112A/K144E/V175A/P198T, I36T/I46V/D55G/M97L/K106E/K144E/T185A/R195G, I36T/I83T/M97L/K144E/P198T, I36T/M97L/K111E, I36T/M97L/K144E/P198T, I36T/M97L/Q155H/F193S/N201Y, I36T/M97L/V129D, L35P/I36S/M97L/K111E, M18I/I36T/E53G/M97L/K144E/E199G/V207A, M18T/I36T/D55N/M97L/K111E, M18V/M97L/T176N/R195G, M97L/S99G, N17D/M97L/S99G, S99G/T185A/R195G/P198T, V129D/H202Q, V129D/P198T, V129D/T150A, V93E/V129D, Y10F/M18V/S99G/Q138R/T203A, N45D, K160M/R195G, N45D/K144E, N45D/P198S, N45D/P198T, N45D/R195G, N45D/R195S, N45D/S131F, N45D/V58D, V129D/R195S, I98T/F173Y/L196S, N45D/E134G/L213P, N45D/F173I/S177C, N45D/I148V/R195G, N45D/K111T/R195G, N45D/N113Y/R195S, N45D/N165Y/E170G, N45D/Q89R/I98V, N45D/S131F/P198S, N45D/S75P/P198S, N45D/V50A/R195T, E27D/N45D/T183A/I188V, F173Y/T183I/L196S/T203A, K23N/N45D/S75P/N120S, N45D/G102D/R194W/R195G, N45D/G52V/Q121L/P198S, N45D/I148V/R195G/N201D, N45D/K111T/T183A/I188V, N45D/Q89R/F189S/P198S, N45D/S99G/C137R/V207A, N45D/T163I/K167R/R195G, N45D/T183A/T192S/R194G, N45D/V50A/I119T/K144E, T19A/N45D/K144E/R195G, V11E/N45D/T130A/P198T, V26A/N45D/T163I/T185A, K23N/N45D/L124S/K167T/R195G, K23N/N45D/Q73R/T163I, K28E/N45D/W149R/S158G/P198T, K28R/N45D/K57E/I98V/R195S, K28R/N45D/V129D/T163N/R195T, M41K/D43G/N45D/R64S/R195G, M41K/D43G/N45D/R64S/S99G, N45D/R68L/F173L/D197G/P198S, N45D/V50A/I148V/R195G/N201D, M41K/D43G/K44E/N45D/R195G/N201D, or N45D/V50A/L124S/K144E/L179P/R195G.

[0467] 13. The variant PD-L1 polypeptide of any of embodiments 1-13, wherein the one or more amino acid modifications correspond to position(s) selected from 20, 27, 28, 33, 36, 41, 43, 45, 50, 58, 71, 75, 78, 97, 99, or 195, optionally wherein the one or more amino acid substitutions are selected from I20L, E27G, K28E, A33D, I36T, M41K, D43G, N45D, N45T, V50A, V58A, K71E, S75P, N78I, M97L, S99G, or R195G, or a conservative amino acid substitution thereof.

[0468] 14. The variant PD-L1 polypeptide of any of embodiments 1-13, wherein the one or more amino acid modifications correspond to position(s) selected from 20, 27, 33, 36, 43, 45, 50, 58, 75 or 78, optionally wherein the one or more amino acid substitutions are selected from I20L, E27G, A33D, I36T, D43G, N45D, N45T, V50A, V58A, S75P, N78I, or a conservative amino acid substitution thereof.

[0469] 15. The variant PD-L1 polypeptide of any of claims 1-14, wherein the variant PD-L1 polypeptide comprises amino acid modifications I20L/I36T, I20L/D43G, I20L/N45D, I20L/N45T, I20L/N45T, I20L/V50A, I20L/V58A, I20L/S75P, I20L/N78I, I36T/D43G, I36T/N45D, I36T/N45T, I36T/V50A, I36T/V58A, I36T/S75P, I36T/N78I, D43G/N45D, D43G/N45T, D43G/V50A, D43G/V58A, D43G/S75P, D43G/N78I, N45D/V50A, N45D/V58A, N45D/S75P, N45D/N78I, N45T/V50A, N45T/V58A, N45T/S75P, N45T/N78I, V50A/V58A, V50A/S75P, V50A/N78I, V58A/S75P, V58A/N78I, or S75P/N78I.

[0470] 16. The variant PD-L1 polypeptide of any of claims 1-15, wherein the variant PD-L1 polypeptide comprises amino acid modifications D43G/N45D/V58A.

[0471] 17. The variant PD-L1 polypeptide of any of claims 1-16, wherein the variant PD-L1 polypeptide comprises amino acid modifications D43G/N45D/L56Q/V58A/G101G-ins (G101GG) or I20L/K28E/D43G/N45D/V58A/Q89R/G101G-ins (G101GG).

[0472] 18. The variant PD-L1 polypeptide of any of embodiments 1-17, wherein:

[0473] the variant PD-L1 polypeptide comprises or consists of the extracellular domain (ECD); and/or

[0474] the variant PD-L1 polypeptide comprises or consists of the IgV domain or a specific fragment thereof and the IgC domain or a specific fragment thereof.

[0475] 19. The variant PD-L1 polypeptide of any of embodiments 1-18, comprising or consisting of the sequence of amino acids set forth in any of SEQ ID NOS: 56-120, 1725, 1729-1818, 1819-1907, 1943-2008 or a specific binding fragment thereof, or a sequence of amino acids that exhibits at least 95% sequence identity to any of SEQ ID NOS: 56-120, 1725, 1729-1818, 1819-1907, 1943-2008 or a specific binding fragment thereof and that contains the one or more of the amino acid substitutions.

[0476] 20. The variant PD-L1 polypeptide of any of embodiments 1-19, wherein the variant PD-L1 polypeptide comprises or consists of the ECD or IgV domain or a specific binding fragment thereof.

[0477] 21. The variant PD-L1 polypeptide of any of embodiments 1-20, wherein the IgV domain or specific binding fragment thereof is the only PD-L1 portion of the variant PD-L1 polypeptide.

[0478] 22. The variant PD-L1 polypeptide of any of embodiments 1-21, comprising or consisting of the sequence of amino acids set forth in any of SEQ ID NOS: 121-185, 244-308, 1726-1727, 1908-1937 or a specific binding fragment thereof, a sequence of amino acids that exhibits at least 95% sequence identity to any of SEQ ID NOS: 121-185, 244-308, 1726-1727, 1908-1937 or a specific binding fragment thereof and that contains the one or more of the amino acid substitutions.

[0479] 23. The variant PD-L1 polypeptide of any of embodiments 1-17, wherein the IgC domain or specific binding fragment thereof is the only PD-L1 portion of the variant PD-L1 polypeptide.

[0480] 24. The variant PD-L1 polypeptide of any of embodiments 1-23, wherein the variant PD-L1 polypeptide specifically binds to the ectodomain of PD-1 or CD80 with increased affinity compared to the unmodified PD-L1.

[0481] 25. The variant PD-L1 polypeptide of any of embodiments 1-24, wherein the variant PD-L1 polypeptide specifically binds to the ectodomain of PD-1 with increased affinity compared to the unmodified PD-L1.

[0482] 26. The variant PD-L1 polypeptide of any of embodiments 1-25, wherein the variant PD-L1 polypeptide specifically binds to the ectodomain of PD-1 and the ectodomain of CD80 each with increased affinity compared to the unmodified PD-L1.

[0483] 27. The variant PD-L1 polypeptide of any of embodiments 1-24, wherein the variant PD-L1 polypeptide specifically binds to the ectodomain of PD-1 with increased affinity and specifically binds to the ectodomain of CD80 with decreased affinity compared to the unmodified PD-L1.

[0484] 28. The variant PD-L1 polypeptide of any of embodiments 24-27, wherein the increased affinity to the ectodomain of PD-1 is increased more than 1.2-fold, 1.5-fold, 2-fold, 3-fold, 4-fold, 5-fold, 6-fold, 7-fold, 8-fold, 9-fold, 10-fold, 20-fold, 30-fold, 40-fold, 50-fold or 60-fold compared to the unmodified PD-L1.

[0485] 29. The variant PD-L1 polypeptide of embodiment 24 or embodiment 26, wherein the increased affinity to the ectodomain of CD80 is increased more than 1.2-fold, 1.5-fold, 2-fold, 3-fold, 4-fold, 5-fold, 6-fold, 7-fold, 8-fold, 9-fold, 10-fold, 20-fold, 30-fold, 40-fold, 50-fold or 60-fold compared to the unmodified PD-L1.

[0486] 30. The variant PD-L1 polypeptide of embodiment 27, wherein the decreased affinity to the ectodomain of CD80 is decreased more than 1.2-fold, 1.5-fold, 2-fold, 3-fold, 4-fold, 5-fold, 6-fold, 7-fold, 8-fold, 9-fold, 10-fold, 20-fold, 30-fold, 40-fold , 50-fold or 60-fold compared to the unmodified PD-L1.

[0487] 31. The variant PD-L1 polypeptide of any of embodiments 1-30, wherein the variant polypeptide specifically binds to the ectodomain of PD-1 with increased selectivity compared to the unmodified PD-L1.

[0488] 32. The variant PD-L1 polypeptide of embodiment 31, wherein the increased selectivity comprises a greater ratio of binding of the variant polypeptide for PD-1 versus CD80 compared to the ratio of binding of the unmodified PD-L1 polypeptide for PD-1 versus CD80.

[0489] 33. The variant PD-L1 polypeptide of embodiment 32, wherein the ratio is greater by at least or at least about 1.5-fold, 2.0-fold, 3.0-fold, 4.0-fold, 5-fold, 10-fold, 15-fold, 20-fold, 30-fold, 40-fold, 50-fold or more.

[0490] 34. The variant PD-L1 polypeptide of any of embodiments 9-33, wherein the PD-1 is a human PD-1.

[0491] 35. The variant PD-L1 polypeptide of any of embodiments 9-34, wherein the CD80 is a human CD80.

[0492] 36. The variant PD-L1 polypeptide of any of embodiments 1-35, wherein the binding activity is altered (increased or decreased) more than 1.2-fold, 1.5-fold, 2-fold, 3-fold, 4-fold, 5-fold, 6-fold, 7-fold, 8-fold, 9-fold, 10-fold, 20-fold, 30-fold 40-fold or 50-fold compared to the unmodified PD-L1.

[0493] 37. The variant PD-L1 polypeptide of any of embodiments 1-36 that is a soluble protein.

[0494] 38. The variant PD-L1 polypeptide of any of embodiments 1-37, wherein the variant PD-L1 polypeptide is linked to a multimerization domain.

[0495] 39. The variant PD-L1 polypeptide of embodiment38, wherein the multimerization domain is an Fc domain or a variant thereof with reduced effector function.

[0496] 40. The variant PD-L1 polypeptide of any of embodiments 1-39, wherein the variant PD-L1 polypeptide is linked to a moiety that increases biological half-life of the polypeptide.

[0497] 41. The variant PD-L1 polypeptide of any of embodiments 1-40, wherein the variant PD-L1 polypeptide is linked to an Fc domain or a variant thereof with reduced effector function.

[0498] 42. The variant PD-L1 polypeptide of any of embodiments 39-41, wherein:

[0499] the Fc domain is mammalian, optionally human; or

[0500] the variant Fc domain comprises one or more amino acid modifications compared to an unmodified Fc domain that is mammalian, optionally human.

[0501] 43. The variant PD-L1 polypeptide of any one of embodiments 39, 41 and 42, wherein the Fc domain or variant thereof comprises the sequence of amino acids set forth in SEQ ID NO:187 or SEQ ID NO:188 or a sequence of amino acids that exhibits at least 85% sequence identity to SEQ ID NO:187 or SEQ ID NO:188.

[0502] 44. The variant PD-L1 polypeptide of any of embodiments 39 and 41-43, wherein the Fc domain comprises one or more amino acid modifications selected from among E233P, L234A, L234V, L235A, L235E, G236del, G237A, S267K, N297G, R292C, V302C, and K447del each by EU numbering.

[0503] 45. The variant PD-L1 polypeptide of any of embodiments 39 and 41-44, wherein the Fc domain comprises the amino acid modification C220S by EU numbering.

[0504] 46. The variant PD-L1 polypeptide of any of embodiments 39 and 41-45, wherein the Fc domain comprises the sequence of amino acids set forth in any of SEQ ID NOS: 1155, 1157, 1158, 1159, 1715, 1938, 1939, and 1940 or a sequence of amino acids that exhibits at least 85% sequence identity to any of SEQ ID NOS:1155, 1157, 1158, 1159, 1715, 1938, 1939, and 1940, and exhibits reduced effector function.

[0505] 47. The variant PD-L1 polypeptide of any of embodiments 38-46, wherein the variant PD-L1 polypetide is linked indirectly via a linker, optionally a G4S linker.

[0506] 48. The variant PD-L1 polypeptide of any of embodiments 1-47, that is a transmembrane immunomodulatory protein further comprising a transmembrane domain linked to the extracellular domain (ECD) or specific binding fragment thereof of the variant PD-L1 polypeptide.

[0507] 49. The variant PD-L1 polypeptide of embodiment 48, wherein the transmembrane domain comprises the sequence of amino acids set forth as residues 239-259 of SEQ ID NO:3 or a functional variant thereof that exhibits at least 85% sequence identity to residues 239-259 of SEQ ID NO:3.

[0508] 50. The variant PD-L1 polypeptide of embodiment 48 or embodiment 49, further comprising a cytoplasmic signaling domain linked to the transmembrane domain.

[0509] 51. The variant PD-L1 polypeptide of embodiment 50, wherein the cytoplasmic signaling domain comprises the sequence of amino acids set forth as residues 260-290 of SEQ ID NO:3 or a functional variant thereof that exhibits at least 85% sequence identity to residues 260-290 of SEQ ID NO:3.

[0510] 52. The variant PD-L1 polypeptide of any of embodiments 1-51, wherein the variant PD-L1 increases IFN-gamma (interferon-gamma) expression relative to the unmodified PD-L1 in an in vitro T-cell assay.

[0511] 53. The variant PD-L1 polypeptide of any of embodiments 1-52, wherein the variant PD-L1 decreases IFN-gamma (interferon-gamma) expression relative to the unmodified PD-L1 in an in vitro T-cell assay.

[0512] 54. The variant PD-L1 polypeptide of any of embodiments 1-55 that is deglycosylated.

[0513] 55. An immunomodulatory protein, comprising the variant PD-L1 polypeptide of any of embodiments 1-54 and a second polypeptide comprising an immunoglobulin superfamily (IgSF) domain of an IgSF family member or an affinity-modified IgSF domain thereof, said affinity-modified IgSF domain comprising one or more amino acid modifications compared to the unmodified or wild-type IgSF domain of the IgSF family member.

[0514] 56. The immunomodulatory protein of embodiment 55, wherein the variant CD112 polypeptide and the second polypeptide are linked directly or are linked indirectly via a linker.

[0515] 57. The immunomodulatory protein of embodiment 55 or embodiment 56, wherein the IgSF domain is affinity modified and exhibits altered binding to one or more of its cognate binding partner(s) compared to the unmodified or wild-type IgSF domain of the IgSF family member.

[0516] 58. The immunomodulatory protein of embodiment 57, wherein the IgSF domain exhibits increased binding to one or more of its cognate binding partner(s) compared to the unmodified or wild-type IgSF domain of the IgSF family member.

[0517] 59. The immunomodulatory protein of any one of embodiments 58-58, wherein the variant PD-L1 polypeptide is a first PD-L1 variant and the IgSF domain of the second polypeptide is an IgSF domain from a second variant PD-L1 polypeptide of any of embodiments 1-58, wherein the first and second variant PD-L1 polypeptides are the same or different.

[0518] 60. The immunomodulatory protein of any one of embodiments 58-59, wherein the variant PD-L1 polypeptide is capable of specifically binding to PD-1 or CD80 and the IgSF domain of the second polypeptide is capable of binding to a cognate binding partner other than one specifically bound by the PD-L1 variant polypeptide.

[0519] 61. The immunomodulatory protein of any of embodiments 58-60, wherein the IgSF domain is from a member of the B7 family.

[0520] 62. The immunomodulatory protein of any of embodiments 58-61, wherein the IgSF domain is a tumor-localizing moiety that binds to a ligand expressed on a tumor or to an inflammatory-localizing moiety that binds to a cell or tissue associated with an inflammatory environment.

[0521] 63. The immunomodulatory protein of embodiment 62, wherein the ligand is B7H6.

[0522] 64. The immunomodulatory protein of embodiment 62 or embodiment 63, wherein the IgSF domain is from NKp30.

[0523] 65. The immunomodulatory protein of any embodiments 55-64, wherein the IgSF domain of the second polypeptide is an IgSF domain of a ligand that binds to an inhibitory receptor, or is an affinity-modified IgSF domain thereof, optionally wherein the affinity-modified IgSF domain exhibits increased binding affinity and/or binding selectivity for the inhibitory receptor compared to binding of the unmodified IgSF domain to the inhibitory receptor.

[0524] 66. The immunomodulatory protein of embodiment 65, wherein:

[0525] the inhibitory receptor is TIGIT, PD-1, or CTLA-4; or

[0526] the ligand of the inhibitory receptor is PD-L2, CD155, CD112 or CD80.

[0527] 67. The immunomodulatory protein of any of embodiments 55-66, wherein the second polypeptide is selected from:

[0528] (i) a wildtype CD155 comprising an IgSF set forth in any of SEQ ID NOS: 47, 310, or 353, or a variant CD155 polypeptide comprising an IgSF domain set forth in any of SEQ ID NOS:311-352, 354-665, 1505-1576, 1551-1714;

[0529] (ii) a wildtype CD112 comprising an IgSF domain set forth in any of SEQ ID NOS: 48, 666, or 761, or a variant CD112 polypeptide comprising an IgSF domain set forth in any of SEQ ID NOS: 667-760, 762-931, 1433-1504;

[0530] (iii) a wildtype CD80 comprising an IgSF domain set forth in any of SEQ ID NOS: 28, 1005, or 2030, or a variant CD80 polypeptide comprising an IgSF domain set forth in any of SEQ ID NOS: 932-964, 966-1038, 1040-1078, 1080-1112, 1114-1152;

[0531] (iv) a wildtype PD-L2 comprising an IgSF domain set forth in any of SEQ ID NOS: 31, 1203, or 1263, or a variant PD-L2 polypeptide comprising an IgSF domain set forth in any of SEQ ID NOS: 1204-1254, 1256-1331, 1333-1407, 1409-1432;

[0532] (v) a sequence of amino acids that exhibits at least 95% sequence identity to any of the SEQ ID NOSs in (i)-(iv) and that comprises the amino acid substitution; or

[0533] (vi) a specific binding fragment of any of (i)-(v).

[0534] 68. The immunomodulatory protein of any of embodiments 55-67, further comprising a third polypeptide comprising an IgSF domain of an IgSF family member or an affinity-modified IgSF domain thereof, said affinity-modified IgSF domain comprising one or more amino acid modifications compared to the unmodified or wild-type IgSF domain of the IgSF family member, wherein:

[0535] the third polypeptide is the same as the first and/or second polypeptide; or

[0536] the third polypeptide is different from the first and/or second polypeptide.

[0537] 69. The immunomodulatory protein of embodiment 68, wherein the third polypeptide is selected from:

[0538] (i) a wildtype CD155 comprising an IgSF set forth in any of SEQ ID NOS: 47, 310, or 353, or a variant CD155 polypeptide comprising an IgSF domain set forth in any of SEQ ID NOS:311-352, 354-665, 1505-1576, 1551-1714;

[0539] (ii) a wildtype CD112 comprising an IgSF domain set forth in any of SEQ ID NOS: 48, 666, or 761, or a variant CD112 polypeptide comprising an IgSF domain set forth in any of SEQ ID NOS: 667-760, 762-931, 1433-1504;

[0540] (iii) a wildtype CD80 comprising an IgSF domain set forth in any of SEQ ID NOS: 28, 1005, or 2030, or a variant CD80 polypeptide comprising an IgSF domain set forth in any of SEQ ID NOS: 932-964, 966-1038, 1040-1078, 1080-1112, 1114-1152;

[0541] (iv) a wildtype PD-L2 comprising an IgSF domain set forth in any of SEQ ID NOS: 31, 1203, or 1263, or a variant PD-L2 polypeptide comprising an IgSF domain set forth in any of SEQ ID NOS: 1204-1254, 1256-1331, 1333-1407, 1409-1432;

[0542] (v) a sequence of amino acids that exhibits at least 95% sequence identity to any of the SEQ ID NOSs in (i)-(iv) and that comprises the amino acid substitution; or

[0543] (vi) a specific binding fragment of any of (i)-(v).

[0544] 70. The immunomodulatory protein of any of embodiments 55-69, wherein the IgSF domain or affinity-modified IgSF domain thereof, optionally of the second or third polypeptide, is or comprises an IgV domain.

[0545] 71. The immunomodulatory protein of any of embodiments 55-70, wherein the variant PD-L1 polypeptide is or comprises an IgV domain.

[0546] 72. The immunomodulatory protein of any of embodiments 55-71, further comprising at least one additional polypeptide comprising an IgSF domain of an IgSF family member or an affinity-modified IgSF domain thereof, said affinity-modified IgSF domain comprising one or more amino acid modifications compared to the unmodified or wild-type IgSF domain of the IgSF family member.

[0547] 73. The immunomodulatory protein of any of embodiments 55-67, wherein the immunomodulatory protein further comprises a multimerization domain linked to at least one of the variant PD-L1 polypeptide, or the second polypeptide.

[0548] 74. The immunomodulatory protein of any of embodiments 55-73, wherein the immunomodulatory protein further comprises a multimerization domain linked to at least one of the variant PD-L1 polypeptide, the second polypeptide and/or the third polypeptide, optionally wherein the multimerization domain is an Fc domain or a variant thereof with reduced effector function.

[0549] 75. The immunomodulatory protein of any of embodiments 68-75, wherein the multimerization domain promotes heterodimer formation.

[0550] 76. An immunomodulatory protein comprising a first variant PD-L1 polypeptide of any of embodiments 38-47 in which the multimerization domain is a first multimerization domain and a second variant PD-L1 polypeptide of any of embodiments 38-47 in which the multimerization domain is a second multimerization domain, wherein the first and second multimerization domains interact to form a multimer containing the first and second variant PD-L1 polypeptide, optionally wherein the first and second variant PD-L1 polypeptide are the same.

[0551] 77. An immunomodulatory protein comprising the immunomodulatory protein of any of embodiments 73-75, wherein the multimerization domain is a first multimerization domain and interacts with a second multimerization domain to form a multimer comprising the immunomodulatory protein.

[0552] 78. The immunomodulatory protein of embodiment 77, wherein the immunomodulatory protein is a first immunomodulatory protein and a second immunomodulatory protein is linked directly or indirectly via a linker to the second multimerization domain, wherein the multimer comprises the first and second immunomodulatory protein, optionally wherein the second immunomodulatory protein is an immunomodulatory protein of any of claims 68-70 in which the multimerization domain is the second multimerization domain.

[0553] 79. The immunomodulatory protein of any of embodiments 76-78, wherein the multimer is a dimer.

[0554] 80. The immunomodulatory protein of any of embodiments 76-79 that is a homodimer, optionally wherein the first and second multimerization domain is the same.

[0555] 81. The immunomodulatory protein of any of claims 77-80, wherein:

[0556] the second polypeptide is a variant CD155 polypeptide and the first and/or second immunomodulatory protein comprises the sequence set forth in any of SEQ ID NOS: 1716-1721, or a sequence of amino acids that exhibits at least 85%, 86%, 87%, 88%, 89%, 90%, 91%, 92%, 93%, 94%, 95%, 96%, 97%, 98% or 99% sequence identity to any of SEQ ID NOS: 1716-1721; or

[0557] the second polypeptide is CD112 or CD155 and the third polypeptide is the other of CD112 or CD155 and the first and/or second immunomodulatory portion comprise the sequence set forth in any of SEQ ID NOS: 1722-1724, or a sequence of amino acids that exhibits at least 85%, 86%, 87%, 88%, 89%, 90%, 91%, 92%, 93%, 94%, 95%, 96%, 97%, 98% or 99% sequence identity to any of SEQ ID NOS: 1716-1721.

[0558] 82. The immunomodulatory protein of any of embodiments 76-79 that is a heterodimer, optionally wherein the first and second multimerization domain are different and/or are capable of interacting to mediate heterodimer formation.

[0559] 83. The immunomodulatory protein of any of embodiments 76-82, wherein the first and/or second multimerization domain is an Fc domain or a variant thereof with reduced effector function, optionally wherein:

[0560] the Fc domain is of an immunoglobulin protein that is human and/or the Fc region is human, optionally wherein the Fc region is of an immunoglobulin G1 (IgG1) or an immunoglobulin G2 (IgG2), optionally set forth in SEQ ID NO:187 or SEQ ID NO:188, optionally wherein the Fc region exhibits one or more effector functions; or

[0561] the variant Fc domain comprises one or more amino acid substitutions in a wildtype Fc region, optionally wherein the reduced effector function is reduced compared to a wildtype Fc region, optionally wherein the wildtype human Fc is of human IgG1.

[0562] 84. The immunomodulatory protein of any of embodiments 76-83, wherein the first and second multimerization domain is the same or different.

[0563] 85. The immunomodulatory protein of any of embodiments 74, 75, 83 and 84, wherein the variant Fc region comprises:

[0564] the amino acid substitutions E233P, L234A, L234V, L235A, L235E, G236del, G237A, S267K, or N297G, with residue numbering according to the EU index of Kabat; or

[0565] the amino acid substitutions R292C/N297G/V302C or L234A/L235E/G237A, with residue numbering according to the EU index of Kabat.

[0566] 86. The immunomodulatory protein of any of embodiments 74, 75 and 83-85, wherein the Fc region or variant Fc region comprises the amino acid substitution C220S, with residue numbering according to the EU index of Kabat.

[0567] 87. The immunomodulatory protein of any of embodiments 74, 75 and 83-86, wherein the Fc region or variant Fc region comprises K447del, with residue numbering according to the EU index of Kabat.

[0568] 88. A conjugate, comprising a variant PD-L1 of any of embodiments 1-54, or an immunomodulatory protein of any of embodiments 55-87 linked to a moiety.

[0569] 89. The conjugate of embodiment 88, wherein the moiety is a targeting moiety that specifically binds to a molecule on the surface of a cell.

[0570] 90. The conjugate of embodiment 89, wherein the targeting moiety specifically binds to a molecule on the surface of an immune cell, optionally wherein the immune cell is an antigen presenting cell or a lymphocyte.

[0571] 91. The conjugate of embodiment 89, wherein the targeting moiety is a tumor-localizing moiety that binds to a molecule on the surface of a tumor.

[0572] 92. The conjugate of any of embodiments 88-91, wherein the moiety is a protein, a peptide, nucleic acid, small molecule or nanoparticle.

[0573] 93. The conjugate of any of embodiments 88-93, wherein the moiety is an antibody or antigen-binding fragment.

[0574] 94. The conjugate of any of embodiments 88-94, wherein the conjugate is divalent, tetravalent, hexavalent or octavalent.

[0575] 95. The conjugate of any of embodiments 88-94 that is a fusion protein.

[0576] 96. A nucleic acid molecule, encoding a variant PD-L1 polypeptide of any of embodiments 1-54, an immunomodulatory protein of any of embodiments 55-87 or a conjugate that is a fusion protein of any of embodiments 88-95.

[0577] 97. The nucleic acid molecule of embodiment 96 that is synthetic nucleic acid.

[0578] 98. The nucleic acid molecule of embodiment 96 or embodiment 97 that is cDNA.

[0579] 99. A vector, comprising the nucleic acid molecule of any of embodiments 96-98.

[0580] 100. The vector of embodiment 99 that is an expression vector.

[0581] 101. The vector of embodiment 99 or embodiment 100, wherein the vector is a mammalian expression vector or a viral vector.

[0582] 102. A cell, comprising the vector of embodiment 100 or embodiment 101.

[0583] 103. The cell of embodiment 102 that is a mammalian cell.

[0584] 104. The cell of embodiment 102 or embodiment 103 that is a human cell.

[0585] 105. A method of producing a variant PD-L1 polypeptide or an immunomodulatory protein, comprising introducing the nucleic acid molecule of any of embodiments 96-98 or vector of any of embodiments 99-101 into a host cell under conditions to express the protein in the cell.

[0586] 106. The method of embodiment 105, further comprising isolating or purifying the variant PD-L1 polypeptide or immunomodulatory protein from the cell.

[0587] 107. A method of engineering a cell expressing a variant PD-L1 variant polypeptide, comprising introducing a nucleic acid molecule encoding the variant PD-L1 polypeptide of any of embodiments 1-54 into a host cell under conditions in which the polypeptide is expressed in the cell.

[0588] 108. An engineered cell, expressing the variant PD-L1 polypeptide of any of embodiments 1-54, the immunomodulatory protein of any of embodiments 55-87, a conjugate that is a fusion protein of any of claims 88-95, the nucleic acid molecule of any of embodiments 96-98 or the vector of any of embodiments 99-101.

[0589] 109. The engineered cell of embodiment 108, wherein the variant PD-L1 polypeptide or immunomodulatory protein is encoded by a nucleic acid comprising a sequence of nucleotides encoding comprises a signal peptide.

[0590] 110. The engineered cell of embodiment 108 or embodiment 109, wherein the variant PD-L1 polypeptide or immunomodulatory protein does not comprise a transmembrane domain and/or is not expressed on the surface of the cell.

[0591] 111. The engineered cell of any of embodiments 108-110, wherein the variant PD-L1 polypeptide or immunomodulatory protein is secreted from the engineered cell.

[0592] 112. The engineered cell of embodiment 108 or embodiment 110, wherein the engineered cell comprises a variant PD-L1 polypeptide that comprises a transmembrane domain and/or is the transmembrane immunomodulatory protein of any of embodiments 48-54.

[0593] 113. The engineered cell of any of embodiments 108, 110 and 112, wherein the variant PD-L1 polypeptide is expressed on the surface of the cell.

[0594] 114. The engineered cell of any of embodiments 108-113, wherein the cell is an immune cell.

[0595] 115. The engineered cell of embodiment 114, wherein the immune cell is an antigen presenting cell (APC) or a lymphocyte.

[0596] 116. The engineered cell of any of embodiments 108-115 that is a primary cell.

[0597] 117. The engineered cell of any of embodiments 108-116, wherein the cell is a mammalian cell.

[0598] 118. The engineered cell of any of embodiments 108-117, wherein the cell is a human cell.

[0599] 119. The engineered cell of any of embodiments 108-118, wherein the cell is a lymphocyte and the lymphocyte is a T cell.

[0600] 120. The engineered cell of embodiment 115, wherein the cell is an APC and the APC is an artificial APC.

[0601] 121. The engineered cell of any of embodiments 108-120, further comprising a chimeric antigen receptor (CAR) or an engineered T-cell receptor.

[0602] 122. An infectious agent, comprising a nucleic acid molecule encoding a variant PD-L1 polypeptide of any of embodiments 1-54 or an immunomodulatory protein of any of embodiments 55-84 or a conjugate that is a fusion protein of any of claims 88-95.

[0603] 123. The infectious agent of embodiment 122, wherein the encoded variant PD-L1 polypeptide or immunomodulatory protein does not comprise a transmembrane domain and/or is not expressed on the surface of a cell in which it is expressed.

[0604] 124. The infectious agent of embodiment 122 or embodiment 123, wherein the encoded variant PD-L1 polypeptide or immunomodulatory protein is secreted from a cell in which it is expressed.

[0605] 125. The infectious agent of embodiment 122, wherein the encoded variant PD-L1 polypeptide comprises a transmembrane domain.

[0606] 126. The infectious agent of embodiment 122 or embodiment 125, wherein the encoded variant PD-L1 polypeptide is expressed on the surface of a cell in which it is expressed.

[0607] 127. The infectious agent of any of embodiments 122-126, wherein the infectious agent is a bacterium or a virus.

[0608] 128. The infectious agent of embodiment 127, wherein the infectious agent is a virus and the virus is an oncolytic virus.

[0609] 129. The infectious agent of embodiment 128, wherein the oncolytic virus is an adenovirus, adeno-associated virus, herpes virus, Herpes Simplex Virus, Vesticular Stomatic virus, Reovirus, Newcastle Disease virus, parvovirus, measles virus, vesticular stomatitis virus (VSV), Coxsackie virus or a Vaccinia virus.

[0610] 130. The infectious agent of embodiment 129, wherein the virus specifically targets dendritic cells (DCs) and/or is dendritic cell-tropic.

[0611] 131. The infectious agent of embodiment 130, wherein the virus is a lentiviral vector that is pseudotyped with a modified Sindbis virus envelope product.

[0612] 132. The infectious agent of any of embodiments 122-131, further comprising a nucleic acid molecule encoding a further gene product that results in death of a target cell or that can augment or boost an immune response.

[0613] 133. The infectious agent of embodiment 132, wherein the further gene product is selected from an anticancer agent, anti-metastatic agent, an antiangiogenic agent, an immunomodulatory molecule, an immune checkpoint inhibitor, an antibody, a cytokine, a growth factor, an antigen, a cytotoxic gene product, a pro-apoptotic gene product, an anti-apoptotic gene product, a cell matrix degradative gene, genes for tissue regeneration or reprogramming human somatic cells to pluripotency.

[0614] 134. A pharmaceutical composition, comprising the variant PD-L1 polypeptide of any of embodiments 1-47 and 48-54, an immunomodulatory protein of any of embodiments 55-87, a conjugate of any of embodiments 88-95 or an engineered cell of any of embodiments 108-121 or an infectious agent of any of embodiments 122-133.

[0615] 135. The pharmaceutical composition of embodiment 134, comprising a pharmaceutically acceptable excipient.

[0616] 136. The pharmaceutical composition of embodiment 134 or embodiment 135, wherein the pharmaceutical composition is sterile.

[0617] 137. An article of manufacture comprising the pharmaceutical composition of any of embodiments 134-136 in a vial.

[0618] 138. The article of manufacture of embodiment 137, wherein the vial is sealed.

[0619] 139. A kit comprising the pharmaceutical composition of any of embodiments 134-136, and instructions for use.

[0620] 140. A kit comprising the article of manufacture of embodiment 137 or embodiment 138, and instructions for use.

[0621] 141. A method of modulating an immune response in a subject, comprising administering the pharmaceutical composition of any of embodiments 123-125 to the subject.

[0622] 142. A method of modulating an immune response in a subject, comprising administering the engineered cells of any of embodiments 108-121 to the subject.

[0623] 143. The method of embodiment 142, wherein the engineered cells are autologous to the subject.

[0624] 144. The method of embodiment 142, wherein the engineered cells are allogenic to the subject.

[0625] 145. The method of any of embodiments 141-144, wherein modulating the immune response treats a disease or condition in the subject.

[0626] 146. The method of any of embodiments 141-145, wherein the immune response is increased.

[0627] 147. The method of any of embodiments 141-146, wherein a variant PD-L1 polypeptide or immunomodulatory protein that is soluble is administered to the subject.

[0628] 148. The method of any of embodiments 141-147, wherein the variant PD-L1 polypeptide or immunomodulatory protein is an Fc fusion protein.

[0629] 149. The method of any of embodiments 142-148, wherein a variant PD-L1 polypeptide of any of embodiments 1-47 and 52-54, the immunomodulatory protein of any of embodiments 55-87, or the conjugate of 88-95 is administered to the subject.

[0630] 150. The method of any of embodiments 142-146, wherein an engineered cell comprising a secretable variant PD-L1 polypeptide is administered to the subject.

[0631] 151. The method of any of embodiments 142-146 and 150, wherein an engineered cell of any of embodiments 97-100 and 103-110 is administered to the subject.

[0632] 152. The method of any of embodiments 141, 145 and 146, wherein an infectious agent encoding a variant PD-L1 polypeptide that is a secretable immunomodulatory protein is administered to the subject, optionally under conditions in which the infectious agent infects a tumor cell or immune cell and the secretable immunomodulatory protein is secreted from the infected cell.

[0633] 153. The method of any of embodiments 141-152, wherein the disease or condition is a tumor or cancer.

[0634] 154. The method of any one of embodiments 141-153, wherein the disease or condition is selected from melanoma, lung cancer, bladder cancer, a hematological malignancy, liver cancer, brain cancer, renal cancer, breast cancer, pancreatic cancer, colorectal cancer, spleen cancer, prostate cancer, testicular cancer, ovarian cancer, uterine cancer, gastric carcinoma, a musculoskeletal cancer, a head and neck cancer, a gastrointestinal cancer, a germ cell cancer, or an endocrine and neuroendocrine cancer.

[0635] 155. The method of any of embodiments 141-145, wherein the immune response is decreased.

[0636] 156. The method of any of embodiments 141, 145 and 155, wherein an immunomodulatory protein or conjugate comprising a variant PD-L1 polypeptide linked to an IgSF domain or a moiety that localizes to a cell or tissue of an inflammatory environment is administered to the subject.

[0637] 157. The method of embodiment 156, wherein the binding molecule comprises an antibody or an antigen-binding fragment thereof or comprises a wild-type IgSF domain or variant thereof.

[0638] 158. The method of any of embodiments 141-145 and 155-157, wherein the immunomodulatory protein of any of embodiments 57-76 or the conjugate of any of embodiments 77-84 is administered to the subject.

[0639] 159. The method of any of embodiments 141-145 and 155, wherein a variant PD-L1 polypeptide that is a transmembrane immunomodulatory protein is administered to the subject.

[0640] 160. The method of any of embodiments 142-145 and 155-159, wherein the engineered cell comprising a variant PD-L1 polypeptide that is a transmembrane immunomodulatory protein of any of embodiments 48-87 is administered to the subject.

[0641] 161. The method of any of embodiments 141, 145 and 155, wherein an infectious agent encoding a variant PD-L1 polypeptide that is a transmembrane immunomodulatory protein is administered to the subject, optionally under conditions in which the infectious agent infects a tumor cell or immune cell and the transmembrane immunomodulatory protein is expressed on the surface of the infected cell.

[0642] 162. The method of any of embodiments 141-145 and 155-161, wherein the disease or condition is an inflammatory or autoimmune disease or condition.

[0643] 163. The method of any of embodiments 141-145 and 155-162, wherein the disease or condition is an antineutrophil cytoplasmic antibodies (ANCA)-associated vasculitis, a vasculitis, an autoimmune skin disease, transplantation, a Rheumatic disease, an inflammatory gastrointestinal disease, an inflammatory eye disease, an inflammatory neurological disease, an inflammatory pulmonary disease, an inflammatory endocrine disease, or an autoimmune hematological disease.

[0644] 164. The method of embodiment 162 or embodiment 163, wherein the disease or condition is selected from inflammatory bowel disease, transplant, Crohn's disease, ulcerative colitis, multiple sclerosis, asthma, rheumatoid arthritis, or psoriasis.

### IX. EXAMPLES

[0645] The following examples are included for illustrative purposes only and are not intended to limit the scope of the invention.

### Example 1

### Generation of Mutant DNA Constructs of IgSF Domains

[0646] Example 1 describes the generation of mutant DNA constructs of human PD-L1 IgSF domains for translation and expression on the surface of yeast as yeast display libraries.

[0647] A. Degenerate Libraries

[0648] Constructs were generated based on a wildtype human PD-L1 sequence set forth in SEQ ID NO:309 containing the immunoglobulin-like V-type (IgV) IgV domain as follows:

FTVTVPKDLYVVEYGSNMTIECKFPVEKQLDLAALIVYWEMEDKNIIQFV
HGEEDLKVQHSSYRQRARLLKDQLSLGNAALQITDVKLQDAGVYRCMISY
GGADYKRITVKVNA

[0649] For libraries that target specific residues for complete or partial randomization with degenerate codons, degenerate codons, such as specific mixed base sets to code for various amino acid substitutions, were generated using an algorithm at the URL: rosettadesign.med.unc.edu/SwiftLib/.

[0650] In general, positions to mutate were chosen from direct crystal structure information for PDL1:PD1 complex (eg PDB:4ZQK). Alternatively, a homology models may be generated if structures of homologous protein complexes are available. Using the structural information, a structure viewer (available at the URL: spdbv.vital-it.ch) was used to identify contact or non-contact interface residues for mutagenesis with degenerate codons.

[0651] The next step in library design was the alignment of human, mouse, rat, and monkey PD-L1 sequences to identify which of the residues chosen for mutagenesis are conserved residues. Based on this analysis, conserved target residues were mutated with degenerate codons that only specified conservative amino acid changes plus the wild-type residue. Residues that were not conserved, were mutated more aggressively, but also including the wild-type residue. Degenerate codons that also encoded the wild-type residue were deployed to avoid excessive mutagenesis of target protein. For the same reason, only up to 20 positions were targeted for mutagenesis for each library. Mutational analysis was focused on contact and non-contact interfacial residues that were within 6 Å of the binding surface with their side chains directed toward the ligand/counter structure. To generate DNA encoding the targeted library, overlapping oligos of up to 80 nucleotides in length and containing degenerate codons at the residue positions targeted for mutagenesis, were ordered from Integrated DNA Technologies (Coralville, USA). The oligonucleotides were dissolved in sterile water, mixed in equimolar ratios, heated to 95° C. for five minutes and slowly cooled to room temperature for annealing. IgV domain-specific oligonucleotide primers that anneal to the start and end of the IgV domain gene sequence were then used to generate a first PCR product. IgV domain-specific oligonucleotides which overlap by 40 bp with pBYDS03 cloning vector (Life Technologies USA), beyond and including the BamHI and KpnI cloning sites, were then used to amplify 100 ng of PCR product from the prior step to generate a total of at least 12 μg of DNA for every elextroproation. Both PCR's were by polymerase chain reaction (PCR) using OneTaq 2× PCR master mix (New England Biolabs, USA). The second PCR products were purified using a PCR purification kit (Qiagen, Germany) and resuspended in sterile deionized water. Alternatively, Ultramers (Integrated DNA Technologies) of up to 200 bp in length were used in conjunction with megaprimer PCR (URL: http://www.ncbi.nlm.nih.gov/pmc/articles/PMC146891/pdf/253371.pdf) to generate larger stretches of degenerate codons that could not be as easily generated using multiple small overlapping primers. Following the generation of full length product using megaprimer PCR, the mutant IgV domain library was PCR amplified again using DNA primers containing 40 bp overlap region with the modified pBYDS03 cloning variant for homologous recombination into yeast.

[0652] To prepare for library insertion, pBYDS03 vector was digested with BamHI and KpnI restriction enzymes (New England Biolabs, USA) and the large vector fragment was gel-purified and dissolved in sterile, deionized water. Electroporation-ready DNA for the next step was generated by mixing 12 μg of library DNA insert with 4 μg of linearized vector in a total volume of 50 μl deionized and sterile water. An alternative method to generate targeted libraries, is to carry out site-directed mutagenesis (Multisite kit, Agilent, USA) of the target IgV domain with oligonucleotides containing degenerate codons. This approach was used to generate sublibraries that only target a few specific stretches of DNA for mutagenesis. In these cases, sublibraries were mixed before proceeding to the selection steps. In general, library sizes are in the range of 10E7 (10⁷) to 10E8 (10⁸) clones, except that sublibraries are only in the range of 10E4 (10⁴) to 10E5 (10⁵).

[0653] B. Random Libraries

[0654] Random libraries were also constructed to identify variants of the IgV domain of PD-L1 set forth in SEQ ID NO:309 (containing the PD-L1 IgV domain corresponding to residues 19-132 as set forth in UniProt Accession No. Q9NZQ7 flanked by adjacent N- and C-terminal residues of the wildtype sequence). DNA encoding the wild-type IgV domain was cloned between the BamHI and KpnI sites of the yeast display vector pBYDS03. The DNA was then mutagenized with the Genemorph II Kit (Agilent, USA) so as to generate an average of three to five amino acid changes per library variant. Mutagenized DNA was then amplified by the two-step PCR and further processed as described above for targeted libraries.

### Example 2

### Introduction of DNA Libraries into Yeast

[0655] Example 2 describes the introduction of PD-L1 DNA libraries into yeast.

[0656] To introduce degenerate and random library DNA into yeast, electroporation-competent cells of yeast strain BJ5464 (ATCC.org; ATCC number 208288) were prepared and electroporated on a Gene Pulser II (Biorad, USA) with the electroporation-ready DNA from the steps above essentially as described (Colby, D. W. et al. 2004 Methods Enzymology 388, 348-358). The only exception is that transformed cells were grown in non-inducing minimal selective SCD-Leu medium to accommodate the LEU2 selective marker carried by modified plasmid pBYDS03. One liter of SCD-Leu media consists of 14.7 grams sodium citrate, 4.29 grams citric acid monohydrate, 20 grams dextrose, 6.7 grams yeast nitrogen base, and 1.6 grams yeast synthetic drop-out media supplement without leucine. The medium was filter sterilized before use using a 0.22 μm vacuum filter device.

[0657] Library size was determined by plating serial dilutions of freshly recovered cells on SCD-Leu agar plates and then extrapolating library size from the number of single colonies from plating that generated at least 50 colonies per plate. The remainder of the electroporated culture was grown to saturation and cells from this culture were subcultured 1/100 into the same medium once more and grown to saturation to minimize the fraction of untransformed cells and to allow for segregation of plasmid from cells that may contain two or more library variants. To maintain library diversity, this subculturing step was carried out using an inoculum that contained at least 10× more cells than the calculated library size. Cells from the second saturated culture were resuspended in fresh medium containing sterile 25% (weight/volume) glycerol to a density of 10E10/mL and frozen and stored at −80° C. (frozen library stock).

### Example 3

### Yeast Selection

[0658] Example 3 describes the selection of yeast cells expressing affinity-modified variants of PD-L1.

[0659] A number of cells equal to at least 10 times the estimated library size were thawed from individual library stocks, suspended to 0.1×10E6 cells/mL in non-inducing SCD-Leu medium, and grown overnight. The next day, a number of cells equal to 10 times the library size were centrifuged at 2000 RPM for two minutes and resuspended to 0.5×10E6 cells/mL in inducing SCDG-Leu media. One liter of SCDG-Leu induction media consists of 5.4 grams Na₂HPO₄, 8.56 grams NaH₂PO₄•H₂0, 20 grams galactose, 2.0 grams dextrose, 6.7 grams yeast nitrogen base, and 1.6 grams yeast synthetic drop out media supplement without leucine dissolved in water and sterilized through a 0.22 μm membrane filter device. The culture was grown in induction medium for 1 day at room temperature to induce expression of library proteins on the yeast cell surface.

[0660] Cells were sorted two to three times using Protein A magnetic beads (New England Biolabs, USA) loaded with cognate ligand to reduce non-binders and enrich for all variant PD-L1 variants with the ability to bind their exogenous recombinant counter-structure proteins. This was then followed by one to two rounds of fluorescence activated cell sorting (FACS) using exogenous counter-structure protein staining to enrich the fraction of yeast cells that displays improved binders. Magnetic bead enrichment and selections by flow cytometry were carried out essentially as described in Miller K. D. et al., Current Protocols in Cytometry 4.7.1-4.7.30, July 2008.

[0661] With PD-L1 libraries, target ligand proteins were human rPD-1.Fc (i.e., recombinant PD-1-Fc fusion protein from R&D Systems, USA). Magnetic Protein A beads were obtained from New England Biolabs, USA. For two-color, flow cytometric sorting, a Bio-Rad S3e sorter was used. PD-L1 display levels were monitored with an anti-hemagglutinin antibody labeled with Alexafluor 488 (Life Technologies, USA). Ligand binding of Fc fusion protein to rPD-1.Fc, was detected with PE conjugated human Ig specific goat Fab (Jackson ImmunoResearch, USA). Doublet yeast were gated out using forward scatter (FSC)/side scatter (SSC) parameters, and sort gates were based upon higher ligand binding detected in FL2 that possessed more limited tag expression binding in FL1. Alternatively, selections were performed with human rCD80.Fc (i.e., human recombinant CD80 Fc fusion protein from R&D Systems, USA). Selections were carried out largely as described for PD-1 above.

[0662] Yeast outputs from the flow cytometric sorts were assayed for higher specific binding affinity. Sort output yeast were expanded and re-induced to express the particular IgSF affinity modified domain variants they encode. This population then can be compared to the parental, wild-type yeast strain, or any other selected outputs, such as the bead output yeast population, by flow cytometry.

[0663] For PD-L1, the second round FACS outputs (F2) were compared to parental for binding rPD-1.Fc or rCD80.Fc by double staining each population with anti-HA (hemagglutinin) tag expression and the anti-human Fc secondary to detect ligand binding.

[0664] Selected variant PD-L1 IgV domains were further formatted as fusion proteins and tested for binding and functional activity as described below.

### Example 4

### Reformatting Selection Outputs as Fc-Fusions and in Various Immunomodulatory Protein Types

[0665] Example 4 describes reformatting of selection outputs identified in Example 3 as immunomodulatory proteins containing an affinity modified (variant) immunoglobulin-like V-type (IgV) domain of PD-L1 fused to an Fc molecule (variant IgV domain—Fc fusion molecules).

[0666] Output cell pools from final flow cytometric PD-L1 sorts were grown to terminal density in SCD-Leu medium. Plasmid DNA from each output was isolated using a yeast plasmid DNA isolation kit (Zymoresearch, USA). For Fc fusions, PCR primers with added restriction sites suitable for cloning into the Fc fusion vector of choice were used to batch-amplify from the plasmid DNA preps the coding DNA for the mutant target IgV domains. After restriction digestion, the PCR products were ligated into Fc fusion vector followed by heat shock transformation into E. coli strain XL1 Blue (Agilent, USA) or NEB5alpha (New England Biolabs, USA) as directed by supplier. Alternatively, the outputs were PCR amplified with primers containing 40 bp overlap regions on either end with Fc fusion vector to carry out in vitro recombination using Gibson Assembly Mastermix (New England Biolabs), which was subsequently used in heat shock transformation into E. Coli strain NEB5alpha. Exemplary of an Fc fusion vector is pFUSE-hIgG1-Fc2 (Invivogen, USA).

[0667] Dilutions of transformation reactions were plated on LB-agar containing 100 μg/mL carbenicillin (Teknova, USA) to isolate single colonies for selection. Up to 96 colonies from each transformation were then grown in 96 well plates to saturation overnight at 37° C. in LB-broth containing 100 μg/mL carbenicillin (Teknova cat # L8112) and a small aliquot from each well was submitted for DNA sequencing of the IgV domain insert in order to identify mutation(s) in all clones. Sample preparation for DNA sequencing was carried out using protocols provided by the service provider (Genewiz; South Plainfield, N.J.). After removal of sample for DNA sequencing, glycerol was then added to the remaining cultures for a final glycerol content of 25% and plates were stored at −20° C. for future use as master plates (see below). Alternatively, samples for DNA sequencing were generated by replica plating from grown liquid cultures to solid agar plates using a disposable 96 well replicator (VWR, USA). These plates were incubated overnight to generate growth patches and the plates were submitted to Genewiz as specified by Genewiz.

[0668] After identification of clones of interest from analysis of Genewiz-generated DNA sequencing data, clones of interest were recovered from master plates and individually grown to density in liquid LB-broth containing 100 μg/mL carbenicillin (Teknova, USA) and cultures were then used for preparation of plasmid DNA of each clone using a standard kit such as the PureYield Plasmid Miniprep System (Promega, USA) or the MidiPlus kit (Qiagen). Identification of clones of interest from Genewiz sequencing data generally involved the following steps. First, DNA sequence data files were downloaded from the Genewiz website. All sequences were then manually curated so that they start at the beginning of the IgV domain coding region. The curated sequences were then batch-translated using a suitable program available at the URL: www.ebi.ac.uk/Tools/st/emboss_transeq/. The translated sequences were then aligned using a suitable program available at the URL: multalin.toulouse.inra.fr/multalin/multalin.html. Alternatively, Genewiz sequences were processed to generate alignments using Ugene software (http://ugene.net).

[0669] Clones of interest were then identified from alignments using the following criteria: 1.) identical clone occurs at least two times in the alignment and 2.) a mutation occurs at least two times in the alignment and preferably in distinct clones. Clones that meet at least one of these criteria were assumed to be clones that have been enriched by the sorting process due to improved binding.

[0670] To generate recombinant immunomodulatory proteins that are Fc fusion proteins containing an affinity-modified variant of the PD-L1 IgV domain (e.g. variant PD-L1 IgV-Fc), the encoding DNA was generated to encode a protein as follows: variant (mutant) IgV domain followed by a linker of three alanines (AAA) followed by a human IgG1 Fc set forth in SEQ ID NO: 1157 containing the mutations R292C, N297G and V302C by EU numbering (corresponding to R77C, N82G and V87C with reference to wild-type human IgG1 Fc set forth in SEQ ID NO: 187). Since the construct does not include any antibody light chains that can form a covalent bond with a cysteine, the human IgG1 Fc also contains replacement of the cysteine residues to a serine residue at position 220 (C220S) by EU numbering (corresponding to position 5 (C5S) with reference to the wild-type or unmodified Fc set forth in SEQ ID NO: 187.

### Example 5

### Expression and Purification of Fc-Fusions

[0671] Example 5 describes the high throughput expression and purification of Fc-fusion proteins containing variant IgV PD-L1 as described in the above Examples.

[0672] Recombinant variant Fc fusion proteins were produced from suspension-adapted human embryonic kidney (HEK) 293 cells using the with Expi293 expression system (Invitrogen, USA). 4 μg of each plasmid DNA from the previous step was added to 200 μL Opti-MEM (Invitrogen, USA) at the same time as 10.8 μL ExpiFectamine was separately added to another 200 μL Opti-MEM. After 5 minutes, the 200 μL of plasmid DNA was mixed with the 200 μL of ExpiFectamine and was further incubated for an additional 20 minutes before adding this mixture to cells. Ten million Expi293 cells were dispensed into separate wells of a sterile 10 ml, conical bottom, deep 24 well growth plate (Thomson Instrument Company, USA) in a volume 4 mL Expi293 media (Invitrogen, USA). Plates were shaken for 5 days at 120 RPM in a mammalian cell culture incubator set to 95% humidity and 8% CO₂. Following a 5 day incubation, cells were pelleted and culture supernatants were retained.

[0673] Proteins were purified from supernatants using a high throughput 96 well Filter Plate (Thomson Catalog number 931919), each well loaded with 60 μL of Mab SelectSure settled bead (GE Healthcare cat. no. 17543801). Protein was eluted with four consecutive 200 μL fractions, of 50 mM Acetate pH3.3. Each fraction's pH was adjusted to above pH 5.0 with 4 μL 2M Tris pH 8.0. Fractions were pooled and quantitated using 280 nm absorbance measured by Nanodrop instrument (Thermo Fisher Scientific, USA), and protein purity was assessed by loading 5 μg of protein on NUPAGE pre-cast, polyacrylamide gels (Life Technologies, USA) under denaturing and non-reducing conditions and subsequent gel electrophoresis. Proteins were visualized in gel using standard Coomassie staining.

### Example 6

### Assessment of Binding of Affinity-Matured IgSF Domain-Containing Molecules

[0674] A. Binding to Cell-Expressed Counter Structure

[0675] This Example describes Fc-fusion binding studies of purified proteins from the above Examples to assess specificity and affinity of PD-L1 domain variant immunomodulatory proteins for a cognate binding partner.

[0676] Binding studies were carried out using Jurkat/IL-2 reporter cells (purchased from Promega Corp. USA) that were then transduced to stably express human PD-1 (Jurkat/PD-1 cells). For staining by flow cytometry, 100,000 Jurkat/PD-1 cells or negative control (Jurkat only) were plated in 96 well round bottom plates. Cells were spun down and resuspended in staining buffer (PBS (phosphate buffered saline), 1% BSA (bovine serum albumin), and 0.1% sodium azide) for 20 minutes to block non-specific binding. Afterwards, cells were centrifuged again and resuspended in 50 μL staining buffer containing 100 nM to 46 pM of each candidate PD-L1 variant Fc fusion protein. As controls, a full extracellular domain of wild-type PD-L1 (composed of one IgV and one IgC domain) fused to Fc (“Full length ECD of PD-L1”) and a IgV domain of wild-type PD-L1 (“wild type PD-L1 IgV”) were tested. Primary staining was performed on ice for 45 minutes, before washing cells twice in 150 μL staining buffer. PE-conjugated anti-human Fc (Jackson ImmunoResearch, USA) was diluted 1:150 in 50 μL staining buffer and added to cells and incubated another 30 minutes on ice. Secondary antibody was washed out twice, cells were fixed in 4% formaldehyde/PBS, and samples were analyzed on Intellicyt flow cytometer (Intellicyt Corp, USA).

[0677] Mean Fluorescence Intensity (MFI) was calculated and compared to wildtype PD-L1 IgV as control with FlowJo Version 10 (FlowJo Version 10, USA). Results for the binding studies for exemplary tested variant PD-L1 IgV-Fc fusion molecules are shown in Table 10. Table 10 also indicates amino acid substitutions (replacements or insertions designated by “ins”) in the IgV of the variant PD-L1 selected in the screen described above. In the Table, the exemplary amino acid substitutions and insertions in the IgV domain are designated by amino acid position number corresponding to amino acid positions in the respective reference unmodified mature PD-L1 extracellular domain (ECD) sequence set forth in SEQ ID NO:30 or 1728. The amino acid position is indicated in the middle, with the corresponding unmodified (e.g. wild-type) amino acid listed before the number and the identified variant amino acid substitution (or inserted designated by “ins”) listed after the number. Column 2 sets forth the SEQ ID NO identifier for each variant IgV domain contained in the variant IgV-Fc fusion molecule.

[0678] Also shown is the binding activity as measured by the Mean Fluorescence Intensity (MFI) value for binding of 50 nM of each variant Fc-fusion molecule to Jurkat/PD-1 cells and the ratio of the MFI compared to the binding of the corresponding unmodified (wildtype) IgV-Fc fusion molecule not containing the amino acid substitution(s) to PD-1. As shown in Table 10, the selections resulted in the identification of a number of PD-L1 IgSF (e.g. IgV) domain variants that were affinity-modified to exhibit increased binding for PD-1.

TABLE 10
Selected PD-L1 variants and binding data.

| | SEQ | Binding to Jurkat/PD-1 Cells | |
|---|---|---|---|
| | ID | | Fold increase |
| | NO | MFI at | over wildtype |
| PD-L1 Mutation(s) | (IgV) | 50 nM | PD-L1 IgV-Fc |
| K28N, M41V, N45T, H51N, | 244 | 12585 | 2.4 |
| K57E | | | |
| I20L, I36T, N45D, I47T | 245 | 3119 | 0.6 |
| I20L, M41K, K44E | 246 | 9206 | 1.8 |
| P6S, N45T, N78I, I83T | 247 | 419 | 0.1 |
| N78I | 248 | 2249 | 0.4 |
| M41K, N78I | 249 | Little or no protein produced | |
| N17D, N45T, V50A, D72G | 255 | Little or no protein produced | |
| N45T, V50A | 257 | 23887 | 4.6 |
| I20L, N45T, N78I | 258 | 29104 | 5.6 |
| N45T, N78I | 250 | 24865 | 4.7 |
| I20L, N45T | 251 | 24279 | 4.6 |
| I20L, N45T, V50A | 259 | 34158 | 6.5 |
| N45T | 252 | 6687 | 1.3 |
| M41K | 253 | 5079 | 1.0 |
| M41V, N45T | 260 | Little or no protein produced | |
| M41K, N45T | 261 | Little or no protein produced | |
| A33D, S75P, D85E | 262 | 685 | 0.1 |
| M18I, M41K, D43G, H51R, | 263 | 20731 | 4.0 |
| N78I | | | |
| V11E, I20L, I36T, N45D, | 264 | 3313 | 0.6 |
| H60R, S75P | | | |
| A33D, V50A | | Little or no protein produced | |
| S16G, A33D, K71E, S75P | 266 | Little or no protein produced | |
| E27G, N45T, M97I | 267 | 881 | 0.2 |
| E27G, N45T, K57R | 268 | 5022 | 1.0 |
| A33D, E53V | 269 | 650 | 0.1 |
| D43G, N45D, V58A | 270 | 63960 | 12.2 |
| E40G, D43V, N45T, V50A | 271 | 809 | 0.2 |
| Y14S, K28E, N45T | 272 | 16232 | 3.1 |
| A33D, N78S | 273 | 1725 | 0.3 |
| A33D, N78I | 274 | 8482 | 1.6 |
| A33D, N45T | 275 | 17220 | 3.3 |
| E27G, N45T, V50A | 277 | 25267 | 4.8 |
| N45T, V50A, N78S | 278 | 28572 | 5.4 |
| N45T, V50A | 257 | 18717 | 3.6 |
| I20L, N45T, V110M | 279 | 464 | 0.1 |
| I20L, I36T, N45T, V50A | 280 | 7658 | 1.5 |
| N45T, L74P, S75P | 281 | 5251 | 1.0 |
| N45T, S75P | 282 | 12200 | 2.3 |
| S75P, K106R | 283 | 388 | 0.1 |
| S75P | 284 | 1230 | 0.2 |
| A33D, S75P | 285 | 306 | 0.1 |
| A33D, S75P, D104G | 286 | 251 | 0.0 |
| A33D, S75P | 287 | 1786 | 0.3 |
| I20L, E27G, N45T, V50A | 288 | 29843 | 5.7 |
| I20L, E27G, D43G, N45D, | 289 | 69486 | 13.3 |
| V58A, N78I | | | |
| I20L, D43G, N45D, V58A, | 290 | 72738 | 13.9 |
| N78I | | | |
| I20L, A33D, D43G, N45D, | 291 | 80205 | 15.3 |
| V58A, N78I | | | |
| I20L, D43G, N45D, N78I | 292 | 67018 | 12.8 |
| E27G, N45T, V50A, N78I | 293 | 30677 | 5.9 |
| N45T, V50A, N78I | 294 | 32165 | 6.1 |
| V11A, I20L, E27G, D43G, | 295 | 73727 | 14.1 |
| N45D, H51Y, S99G | | | |
| I20L, E27G, D43G, N45T, | 296 | 36739 | 7.0 |
| V50A | | | |
| I20L, K28E, D43G, N45D, | 1727 | 80549 | 15.4 |
| V58A, Q89R, G101G-ins | | | |
| (G101GG) | | | |
| I20L, I36T, N45D | 298 | 16870 | 3.2 |
| I20L, K28E, D43G, N45D, | 299 | 139 | 0.0 |
| E53G, V58A, N78I | | | |
| A33D, D43G, N45D, V58A, | 300 | 58484 | 11.2 |
| S75P | | | |
| K23R, D43G, N45D | 301 | 67559 | 12.9 |
| I20L, D43G, N45D, V58A, | 302 | 259 | 0.0 |
| N78I, D90G, G101D | | | |
| D43G, N45D, L56Q, V58A, | 303 | 88277 | 16.8 |
| G101G-ins (G101GG) | | | |
| I20L, K23E, D43G, N45D, | 304 | 89608 | 17.1 |
| V58A, N78I | | | |
| I20L, K23E, D43G, N45D, | 305 | 88829 | 16.9 |
| V50A, N78I | | | |
| T19I, E27G, N45I, V50A, | 306 | 25496 | 4.9 |
| N78I, M97K | | | |
| I20L, M41K, D43G, N45D | 307 | 599 | 0.1 |
| K23R, N45T, N78I | 308 | 84980 | 16.2 |
| Full length ECD PD-L1 | — | 18465 | 3.5 |
| Wild type PD-L1 IgV | 309 | 5243 | 1.0 |
| Anti-PD-1 monoclonal | — | 79787 | 15.2 |
| antibody (nivolumab) | | | |
| Human IgG | — | 198 | 0.0 |

[0679] B. ForteBio Octet Binding Assay

[0680] Protein-protein interactions between PD-L1 domain variant immunomodulatory proteins and the binding partners PD-1 and CD80 were assessed using Fortebio binding assays. PD-1 or CD80 were loaded individually onto anti-human capture sensors (ForteBio Octet AHC) and Fc fusions of full length wildtype (unmodified) ECD of PD-L1, wildtype (unmodified) PD-L1 IgV-Fc fusion molecule, or variant PD-L1 IgV-Fc fusion molecules were bound to the receptors at a single concentration of 100 nM.

[0681] Loading response of anti-human capture sensors of each binding protein being tested with the variant IgV-Fc fusion molecule was determined and compared to the response of wildtype PD-L1 IgV-Fc. A ratio between the response of each variant PD-L1 IgV-Fc fusion molecule to PD-1 and CD80 was also determined as set forth in Table 11A-B. In each of the Tables below, Column 2 sets forth the SEQ ID NO identifier for each variant IgV domain contained in the tested variant IgV-Fc fusion molecule.

[0682] As shown in Table 11A-B, the selections resulted in the identification of a number of PD-L1 IgSF (e.g. IgV) domain variants that were affinity-modified to exhibit altered binding for PD-1 and/or CD80.

TABLE 11A
ForteBio Binding Data.

| | | | Fold | | Fold | |
|---|---|---|---|---|---|---|
| | | | over | | over | |
| | SEQ | | WT | | WT | PD-1: |
| | ID NO | PD-1: Fc | PD-L1 | CD80: Fc | PD-L1 | CD80 |
| PD-L1 Mutation(s) | (IgV) | Response | IgV-Fc | Response | IgV-Fc | ratio |
| K28N, M41V, N45T, H51N, | 244 | 1.16 | 0.8 | 0.49 | 0.6 | 2.4 |
| K57E | | | | | | |
| I20L, I36T, N45D, I47T | 245 | 0.73 | 0.5 | 0.52 | 0.7 | 1.4 |
| I20L, I36T, N45D | 254 | 1.25 | 0.9 | 0.61 | 0.8 | 2.0 |
| I20L, M41K, K44E | 246 | 2.26 | 1.6 | 1.67 | 2.1 | 1.4 |
| P6S, N45T, N78I, I83T | 247 | 0.27 | 0.2 | 0.23 | 0.3 | 1.2 |
| I20L, F49S | 256 | 0.79 | 0.6 | 0.58 | 0.7 | 1.4 |
| N78L | 248 | 2.23 | 1.6 | 1.55 | 2.0 | 1.4 |
| N45T, V50A | 257 | 1.90 | 1.4 | 0.79 | 1.0 | 2.4 |
| I20L, N45T, N78I | 258 | 2.34 | 1.7 | 1.85 | 2.3 | 1.3 |
| N45T, N78I | 250 | 2.38 | 1.7 | 1.73 | 2.2 | 1.4 |
| I20L, N45T | 251 | 2.30 | 1.7 | 1.58 | 2.0 | 1.5 |
| I20L, N45T, V50A | 259 | 2.32 | 1.7 | 1.22 | 1.5 | 1.9 |
| N45T | 252 | 1.34 | 1.0 | 0.65 | 0.8 | 2.0 |
| M41k | 253 | 2.25 | 1.6 | 1.70 | 2.2 | 1.3 |
| A33D, S75P, D85E | 262 | 0.84 | 0.6 | 0.55 | 0.7 | 1.5 |
| M18I, M41K, D43G, H51R, | 263 | 2.33 | 1.7 | 2.14 | 2.7 | 1.1 |
| N78I | | | | | | |
| V11E, I20L, I36T, N45D, | 264 | 0.93 | 0.7 | 0.56 | 0.7 | 1.7 |
| H60R, S75P | | | | | | |
| E27G, N45T, M97I | 267 | 2.10 | 1.5 | 1.05 | 1.3 | 2.0 |
| E27G, N45T, K57R | 268 | 2.31 | 1.7 | 1.57 | 2.0 | 1.5 |
| A33D, E53V | 269 | 1.09 | 0.8 | 0.62 | 0.8 | 1.7 |
| D43G, N45D, V58A | 270 | 1.55 | 1.1 | 0.71 | 0.9 | 2.2 |
| Y14S, K28E, N45T | 272 | 2.28 | 1.7 | 1.18 | 1.5 | 1.9 |
| A33D, N78S | 273 | 1.61 | 1.2 | 0.79 | 1.0 | 2.0 |
| A33D, N78I | 274 | 2.35 | 1.7 | 1.57 | 2.0 | 1.5 |
| A33D, N45T | 275 | 1.90 | 1.4 | 0.80 | 1.0 | 2.4 |
| A33D, N45T, N78I | 276 | 2.34 | 1.7 | 1.59 | 2.0 | 1.5 |
| E27G, N45T, V50A | 277 | 2.26 | 1.6 | 1.22 | 1.5 | 1.9 |
| N45T, V50A, N78S | 278 | 2.23 | 1.6 | 0.88 | 1.1 | 2.5 |
| N45T, V50A | 257 | 1.79 | 1.3 | 0.63 | 0.8 | 2.8 |
| I20L, N45T, V110M | 279 | 0.38 | 0.3 | 0.27 | 0.3 | 1.4 |
| I20L, I36T, N45T, V50A | 280 | 2.27 | 1.7 | 0.96 | 1.2 | 2.4 |
| N45T, L74P, S75P | 281 | 0.90 | 0.7 | 0.44 | 0.6 | 2.0 |
| N45T, S75P | 282 | 2.31 | 1.7 | 1.24 | 1.6 | 1.9 |
| S75P, K106R | 283 | 0.84 | 0.6 | 0.45 | 0.6 | 1.9 |
| S75P | 284 | 2.09 | 1.5 | 1.09 | 1.4 | 1.9 |
| A33D, S75P | 285 | 0.72 | 0.5 | 0.43 | 0.5 | 1.7 |
| A33D, S75P, D104G | 286 | 0.71 | 0.5 | 0.66 | 0.8 | 1.1 |
| A33D, S75P | 287 | 2.07 | 1.5 | 0.93 | 1.2 | 2.2 |
| Full length ECD PD-L1 | — | 2.53 | 1.8 | 1.46 | 1.8 | 1.7 |
| Wild type PD-L1 IgV | 309 | 1.37 | 1.0 | 0.79 | 1.0 | 1.7 |

TABLE 11B
ForteBio Binding Data.

| | | | Fold | | Fold | |
|---|---|---|---|---|---|---|
| | | | over | | over | |
| | SEQ | | WT | | WT | PD-1: |
| | ID NO | PD-1: Fc | PD-L1 | CD80: Fc | PD-L1 | CD80 |
| PD-L1 Mutation(s) | (IgV) | Response | IgV | Response | IgV | ratio |
| I20L, E27G, N45T, V50A | 288 | 1.08 | 2.0 | 0.39 | 3.2 | 2.7 |
| I20L, E27G, D43G, N45D, | 289 | 1.20 | 2.2 | 0.62 | 5.1 | 1.9 |
| V58A, N78I | | | | | | |
| I20L, D43G, N45D, V58A, | 290 | 1.27 | 2.4 | 0.54 | 4.5 | 2.3 |
| N78I | | | | | | |
| I20L, A33D, D43G, N45D, | 291 | 1.22 | 2.3 | 0.47 | 3.9 | 2.6 |
| V58A, N78I | | | | | | |
| I20L, D43G, N45D, N78I | 292 | 1.25 | 2.3 | 0.49 | 4.0 | 2.6 |
| E27G, N45T, V50A, N78I | 293 | 1.12 | 2.1 | 0.48 | 3.9 | 2.4 |
| N45T, V50A, N78I | 294 | 1.24 | 2.3 | 0.31 | 2.5 | 4.0 |
| V11A, I20L, E27G, D43G, | 295 | 1.20 | 2.2 | 0.28 | 2.3 | 4.3 |
| N45D, H51Y, S99G | | | | | | |
| I20L, E27G, D43G, N45T, | 296 | 1.10 | 2.1 | 0.55 | 4.5 | 2.0 |
| V50A | | | | | | |
| I20L, K28E, D43G, N45D, | 1727 | 1.20 | 2.2 | 0.06 | 0.5 | 18.9 |
| V58A, Q89R, G101G-ins | | | | | | |
| (G101GG) | | | | | | |
| I20L, I36T, N45D | 298 | 0.72 | 1.3 | 0.10 | 0.8 | 7.2 |
| A33D, D43G, N45D, V58A, | 300 | 0.67 | 1.2 | 0.09 | 0.7 | 7.5 |
| S75P | | | | | | |
| K23R, D43G, N45D | 301 | 1.08 | 2.0 | 0.27 | 2.2 | 4.1 |
| I20L, D43G, N45D, V58A, | 302 | −0.02 | 0.0 | −0.04 | −0.3 | 0.5 |
| N78I, D90G, G101D | | | | | | |
| D43G, N45D, L56Q, V58A, | 303 | 1.24 | 2.3 | 0.07 | 0.6 | 18.4 |
| G101G-ins (G101GG) | | | | | | |
| I20L, K23E, D43G, N45D, | 304 | 1.20 | 2.2 | 0.37 | 3.0 | 3.3 |
| V58A, N78I | | | | | | |
| I20L, K23E, D43G, N45D, | 305 | 1.14 | 2.1 | 0.21 | 1.7 | 5.4 |
| V50A, N78I | | | | | | |
| T19I, E27G, N45I, V50A, N78I, | 306 | 1.12 | 2.1 | 0.72 | 5.9 | 1.6 |
| M97K | | | | | | |
| I20L, M41K, D43G, N45D | 307 | 0.01 | 0.0 | 0.02 | 0.2 | 0.6 |
| K23R, N45T, N78I | 308 | 1.19 | 2.2 | 0.53 | 4.3 | 2.3 |
| Full length ECD PD-L1 | — | 1.44 | — | 0.80 | — | — |
| Wild type PD-L1 IgV | 309 | 0.54 | 1.0 | 0.12 | 1.0 | 4.4 |

### Example 7

### Assessment of Bioactivity of Affinity-Matured IgSF Domain-Containing Molecules using Jurkat/IL2/PD-1 Reporter Assay

[0683] This Example describes a Jurkat/IL2/PD-1 reporter assay to assess bioactivity of PD-L1 domain variant immunomodulatory proteins for blockade of PD-1.

[0684] Jurkat effector cells expressing an IL-2-luciferase reporter and PD-1 on its surface were suspended in Jurkat Assay buffer (RPMI1640+5% FBS) at 2×10⁶ cells/mL and 2 μg/mL anti-CD28 was added. Jurkat cells were then plated at 50 μL/well for a total of 100,000 cells per well.

[0685] Variant PD-L1 IgV-Fc fusion molecules and control proteins (full length PD-L1-Fc, wild type PD-L1 IgV-Fc) or anti-PD-1 monoclonal antibody (nivolumab) were diluted to 200 nM and 25 μL of each protein was added to the plated Jurkat cells. The Jurkat cells with PD-L1 variant IgV-Fc fusion molecules or control proteins were incubated for 15 minutes at room temperature. K562 derived artificial antigen presenting cells (aAPC) cells displaying cell surface anti-CD3 single chain Fv (OKT3) and PD-L1 were brought to 0.67×10⁶ cells/mL and 25 μL was added to each well bringing the final volume of each well to 100 μL. Each well had a final ratio of 6:1 Jurkat:K562 cells, 1 ug/mL anti-CD28 and test protein concentration of 50 nM. Jurkat cells and K562 cells were incubated for 5-6 hours at 37 degrees Celsius in a humidified 5% CO₂ incubation chamber. Plates were then removed from the incubator and acclimated to room temperature for 15 minutes. 100 μL of a cell lysis and luciferase substrate solution (BioGlo®, Promega Corp, USA) was added to each well and the plates were placed on an orbital shaker for 10 minutes at room temperature. Luminescence was measured with a 1 second per well integration time using a BioTek Cytation luminometer (BioTek Corp., USA).

[0686] An average relative luminescence value was determined for each variant PD-L1 IgV Fc and a fold increase in IL-2 reporter signal was calculated for each variant compared to wildtype PD-L1 IgV-Fc variant protein.

[0687] As shown in Table 12, luciferase activity of Jurkat effector cells expressing PD-1 and IL-2-luciferase reporter co-cultured with anti-CD3/PD-L1 aAPC and variant PD-L1 IgV-Fc molecules were altered (increased and decreased). The differences in luminescence values demonstrates variant PD-L1 IgV-Fc molecule binding to PD-1 and ability to block the interaction of PD-1 and PD-L1. Higher values are indicative of increased blockade of PD-1-mediated inhibition. In the Table, Column 2 sets forth the SEQ ID NO identifier for each variant IgV domain contained in the tested variant IgV-Fc fusion molecule.

TABLE 12
Jurkat/IL2/PD-1 Reporter Assay

| | | Average | Fold |
|---|---|---|---|
| | SEQ | Relative | increase |
| | ID | Lumi- | in IL2 |
| | NO | nescence | reporter |
| PD-L1 Mutation(s) | (IgV) | Units | signal |
| K28N, M41V, N45T, H51N, K57E | 244 | 2348.00 | 1.05 |
| I20L, I36T, N45D, I47T | 245 | 2249.50 | 1.01 |
| I20L, I36T, N45D | 254 | 2109.50 | 0.95 |
| I20L, M41K, K44E | 246 | 2220.50 | 1.00 |
| P6S, N45T, N78I, I83T | 247 | 2246.00 | 1.01 |
| I20L, F49S | 256 | 2226.50 | 1.00 |
| N78L | 248 | 2243.50 | 1.01 |
| N45T, V50A | 257 | 2076.50 | 0.93 |
| I20L, N45T, N78I | 258 | 2066.00 | 0.93 |
| N45T, N78I | 250 | 2179.50 | 0.98 |
| I20L, N45T | 251 | 2176.50 | 0.98 |
| I20L, N45T, V50A | 259 | 2226.50 | 1.00 |
| N45T | 252 | 2193.00 | 0.98 |
| M41K | 253 | 2154.00 | 0.97 |
| A33D, S75P, D85E | 262 | 2217.50 | 0.99 |
| M18I, M41K, D43G, H51R, N78I | 263 | 2124.50 | 0.95 |
| V11E, I20L, I36T, N45D, H60R, S75P | 264 | 2283.00 | 1.02 |
| E27G, N45T, M97I | 267 | 1971.00 | 0.88 |
| E27G, N45T, K57R | 268 | 2034.00 | 0.91 |
| A33D, E53V | 269 | 2142.00 | 0.96 |
| D43G, D45D, V58A | 270 | 2464.00 | 1.11 |
| E40G, D43V, N45T, V50A | 271 | 2216.00 | 0.99 |
| Y14S, K28E, N45T | 272 | 2151.50 | 0.97 |
| A33D, N78S | 273 | 2056.50 | 0.92 |
| A33D, N78I | 274 | 2057.00 | 0.92 |
| A33D, N45T | 275 | 1995.00 | 0.90 |
| A33D, N45T, N78I | 276 | 1973.00 | 0.89 |
| E27G, N45T, V50A | 277 | 2004.00 | 0.90 |
| N45T, V50A, N78S | 278 | 2224.50 | 1.00 |
| N45T, V50A | 257 | 2201.50 | 0.99 |
| I20L, N45T, V110M | 279 | 2210.00 | 0.99 |
| I20L, I36T, N45T, V50A | 280 | 2157.50 | 0.97 |
| N45T, L74P, S75P | 281 | 2031.00 | 0.91 |
| N45T, S75P | 282 | 1963.50 | 0.88 |
| A33D, V50A | 265 | 2251.50 | 1.01 |
| S75P, K106R | 283 | 2127.50 | 0.95 |
| S75P | 284 | 2233.50 | 1.00 |
| A33D, S75P | 285 | 2168.50 | 0.97 |
| A33D, S75P, D104G | 286 | 2168.50 | 0.97 |
| A33D, S75P | 287 | 2044.50 | 0.92 |
| I20L, E27G, N45T, V50A | 288 | 1804.50 | 0.81 |
| I20L, E27G, D43G, N45D, V58A, | 289 | 4588.50 | 2.06 |
| N78I | | | |
| I20L, D43G, N45D, V58A, N78I | 290 | 4191.50 | 1.88 |
| I20L, A33D, D43G, N45D, V58A, | 291 | 4384.50 | 1.97 |
| N78I | | | |
| I20L, D43G, N45D, N78I | 292 | 3471.50 | 1.56 |
| E27G, N45T, V50A, N78I | 293 | 1960.00 | 0.88 |
| N45T, V50A, N78I | 294 | 1899.00 | 0.85 |
| V11A, I20L, E27G, D43G, N45D, | 295 | 3381.50 | 1.52 |
| H51Y, S99G | | | |
| I20L, E27G, D43G, N45T, V50A | 296 | 2013.50 | 0.90 |
| I20L, K28E, D43G, N45D, V58A, | 1727 | 4294.00 | 1.93 |
| Q89R, G101G-ins (G101GG) | | | |
| I20L, I36T, N45D, | 298 | 2210.50 | 0.99 |
| A33D, D43G, N45D, V58A, S75P | 300 | 2312.50 | 1.04 |
| K23R, D43G, N45D | 301 | 2361.00 | 1.06 |
| I20L, D43G, N45D, V58A, N78I, | 302 | 1998.50 | 0.90 |
| D90G, G101D | | | |
| D43G, N45D, L56Q, V58A, G101G- | 303 | 3926.00 | 1.76 |
| ins (G101GG) | | | |
| I20L, K23E, D43G, N45D, V58A, | 304 | 3506.00 | 1.57 |
| N78I | | | |
| I20L, K23E, D43G, N45D, V50A, | 305 | 3586.00 | 1.61 |
| N78I | | | |
| T19I, E27G, N45I, V50A, N78I, M97K | 306 | 2047.00 | 0.92 |
| I20L, M41K, D43G, N45D | 307 | 2109.50 | 0.95 |
| K23R, N45T, N78I | 308 | 2690.50 | 1.21 |
| Full length PD-L1 Fc | — | 1945.00 | 0.87 |
| Wild type PD-L1 IgV | 309 | 2229.00 | 1.00 |
| Anti-PD-1 monoclonal antibody | — | 8892.00 | 3.99 |
| (nivolumab) | | | |

### Example 8

### Additional Affinity Modified IgSF Domains

[0688] This examples describe the design, creation, and screening of additional affinity modified CD80 (B7-1), PD-L2, CD155 and CD112, and CD86 (B7-2) immunomodulatory proteins, which are other components of the immune synapse (IS) that have a demonstrated dual role in both immune activation and inhibition. Affinity-modified NKp30 variants also were generated and screened. These examples demonstrate that affinity modification of IgSF domains yields proteins that can act to both increase and decrease immunological activity. Various combinations of those domains can be fused in pairs (i.e., stacked) with a variant affinity modified PD-L1 to form a Type II immunomodulatory protein to achieve immunomodulatory activity.

[0689] Mutant DNA constructs encoding a variant of the IgV domain of human CD80, or IgV domains of PD-L2, CD155 and CD112 for translation and expression as yeast display libraries were generated substantially as described in Example 1. Target libraries that target specific residues for complete or partial randomization with degenerate codons and/or random libraries were constructed to identify variants of the IgV of CD80 (SEQ ID NO:2030), variants of the IgV of PD-L2 (SEQ ID NO: 1263), variants of the IgV of CD155 (SEQ ID NO:353), and variants of the IgV of CD112 (SEQ ID NO:761) substantially as described in Example 1. Similar methods also were used to generate libraries of the IgC-like domain of NKp30 (SEQ ID NO:1190).

[0690] The degenerate or random library DNA was introduced into yeast substantially as described in Example 2 to generate yeast libraries. The libraries were used to select yeast expressing affinity modified variants of CD80, PD-L2, CD155, CD112, CD86 (B7-2), and NKp30 substantially as described in Example 3. Cells were processed to reduce non-binders and to enrich for CD80, PD-L2, CD155 or CD112, CD86 (B7-2), and NKp30 variants with the ability to bind their exogenous recombinant counter-structure proteins substantially as described in Example 3.

[0691] With CD80, CD86 and NKp30 libraries, target ligand proteins were sourced from R&D Systems (USA) as follows: human rCD28.Fc (i.e., recombinant CD28-Fc fusion protein), rPDL1.Fc, rCTLA4.Fc, and rB7H6.Fc. Two-color flow cytometry was performed substantially as described in Example 3. Yeast outputs from the flow cytometric sorts were assayed for higher specific binding affinity. Sort output yeast were expanded and re-induced to express the particular IgSF affinity modified domain variants they encode. This population then can be compared to the parental, wild-type yeast strain, or any other selected outputs, such as the bead output yeast population, by flow cytometry.

[0692] In the case of NKp30 yeast variants selected for binding to B7-H6, the F2 sort outputs gave MFI values of 533 when stained with 16.6 nM rB7H6.Fc, whereas the parental NKp30 strain MFI was measured at 90 when stained with the same concentration of rB7H6.Fc (6-fold improvement).

[0693] Among the NKp30 variants that were identified, was a variant that contained mutations L30V/A60V/S64P/S86G with reference to positions in the NKp30 extracellular domain corresponding to positions set forth in SEQ ID NO: 54.

[0694] For CD80 variants provided in Table 13A-B, CD80 libraries consisted of positive selection with the desired counter structure CTLA4 and negative selection with the counter structure CD28.

[0695] For CD155 variants provided in Table 14A, CD155 libraries were selected against each of TIGIT, CD96, and CD226, separately. For CD155 variants provided in Table 14B-F, selection involved two positive selections with the desired counter structures TIGIT and CD96 followed by one negative selection with the counter structure CD226 to select away from CD226 and improve binding specificity of the variant CD155. Selection was performed essentially as described in Example 3 above except the concentrations of the counter structures (TIGIT/CD96) and selection stringency of the positive sorts were varied to optimize lead identification. The concentration of CD226 for the negative selection was kept at 100 nM.

[0696] For CD112 variants provided in Table 15A, CD112 libraries were selected against each of TIGIT, CD112R, and CD226, separately. For additional CD112 variants provided in Table 15B-15C, selection involved two positive selections with the desired counter structures TIGIT and CD112R followed by one negative selection with the counter structure CD226 to select away from CD226 and improve binding specificity of the variant CD112. Selection was performed essentially as described in Example 3 above except the concentrations of the counter structures (TIGIT/CD112R) and selection stringency of the positive sorts were varied to optimize lead identification. The concentration of CD226 for the negative selection was kept at 100 nM.

[0697] For PD-L2 variants provided in Table 16A-B, yeast display targeted or random PD-L2 libraries were selected against PD-1. This was then followed by two to three rounds of flow cytometry sorting using exogenous counter-structure protein staining to enrich the fraction of yeast cells that displays improved binders. Magnetic bead enrichment and selections by flow cytometry are essentially as described in Miller K. D. et al., Current Protocols in Cytometry 4.7.1-4.7.30, July 2008.

[0698] Exemplary selection outputs were reformatted as immunomodulatory proteins containing an affinity modified (variant) IgV of CD80, variant IgV of PD-L2, variant IgV of CD155, variant IgV of CD112, each fused to an Fc molecule (variant ECD-Fc fusion molecules or variant IgV-Fc fusion molecules) substantially as described in Example 4 and the Fc-fusion protein was expressed and purified substantially as described in Example 5.

[0699] Binding of exemplary IgSF domain variants to cell-expressed counter structures was then assessed substantially as described in Example 6. Cells expressing cognate binding partners were produced and binding studies and flow cytometry were carried out substantially as described in Example 6. In addition, the bioactivity of the Fc-fusion variant protein was characterized by either mixed lymphocyte reaction (MLR) or anti-CD3 coimmobilization assay substantially as described in Example 6.

[0700] As above, for each Table, the exemplary amino acid substitutions are designated by amino acid position number corresponding to the respective reference unmodified ECD sequence (Table 2). The amino acid position is indicated in the middle, with the corresponding unmodified (e.g. wild-type) amino acid listed before the number and the identified variant amino acid substitution listed (or inserted designated by a) after the number.

[0701] Also shown is the binding activity as measured by the Mean Fluorescence Intensity (MFI) value for binding of each variant Fc-fusion molecule to cells engineered to express the cognate counter structure ligand and the ratio of the MFI compared to the binding of the corresponding unmodified Fc fusion molecule not containing the amino acid substitution(s) to the same cell-expressed counter structure ligand. The functional activity of the variant Fc-fusion molecules to modulate the activity of T cells also is shown based on the calculated levels of IFN-gamma in culture supernatants (pg/mL) generated either i) with the indicated variant Fc fusion molecule coimmobilized with anti-CD3 or ii) with the indicated variant Fc fusion molecule in an MLR assay. The Tables also depict the ratio of IFN-gamma produced by each variant ECD-Fc or IgV-Fc compared to the corresponding unmodified ECD-Fc or IgV-Fc in the functional assays.

[0702] As shown in Tables 13A-16F, the selections resulted in the identification of a number of PD-L2, CD155, CD112, and CD80 IgSF domain variants that were affinity-modified to exhibit increased binding for at least one, and in some cases more than one, cognate counter structure ligand. In addition, the results showed that affinity modification of the variant molecules also exhibited improved activities to both increase and decrease immunological activity depending on the format of the molecule.

TABLE 13A
Variant CD80 Binding to HEK293 Cells Transfected with CTLA4, CD28 or PD-L1

| | | CTLA4 | | CD28 | | PD-L1 | | |
|---|---|---|---|---|---|---|---|---|
| | SEQ ID | MFI at | Fold | MFI | Fold | MFI at | Fold | Ratio of |
| | NO | 66.6 | change | at 66.6 | change | 22.2 | change | CTLA4: |
| CD80 mutation(s) | (IgV) | nM | to WT | nM | to WT | nM | to WT | CD28 |
| L70P | 1080 | Not tested | | | | | | |
| I30F/L70P | 1081 | Not tested | | | | | | |
| Q27H/T41S/A71D | 1082 | 368176 | 2.3 | 25051 | 1.01 | 24181 | N/A | 14.7 |
| I30T/L70R | 1083 | 2234 | 0.0 | 2596 | 0.10 | 5163 | N/A | 0.9 |
| T13R/C16R/L70Q/A71D | 1084 | 197357 | 1.2 | 16082 | 0.65 | 9516 | N/A | 12.3 |
| T57I | 1085 | 393810 | 2.4 | 23569 | 0.95 | 3375 | N/A | 16.7 |
| M43I/C82R | 1086 | 3638 | 0.0 | 3078 | 0.12 | 7405 | N/A | 1.2 |
| V22L/M38V/M47T/A71D/ | 1087 | 175235 | 1.1 | 3027 | 0.12 | 6144 | N/A | 57.9 |
| L85M | | | | | | | | |
| I30V/T57I/L70P/A71D/ | 1088 | 116085 | 0.7 | 10129 | 0.41 | 5886 | N/A | 11.5 |
| A91T | | | | | | | | |
| V22I/L70M/A71D | 1089 | 163825 | 1.0 | 22843 | 0.92 | 33404 | N/A | 7.2 |
| N55D/L70P/E77G | 1090 | Not tested | | | | | | |
| T57A/I69T | 1091 | Not tested | | | | | | |
| N55D/K86M | 1092 | 3539 | 0.0 | 3119 | 0.13 | 5091 | N/A | 1.1 |
| L72P/T79I | 1093 | 50176 | 0.3 | 3397 | 0.14 | 6023 | N/A | 14.8 |
| L70P/F92S | 1094 | 4035 | 0.0 | 2948 | 0.12 | 6173 | N/A | 1.4 |
| T79P | 1095 | 2005 | 0.0 | 2665 | 0.11 | 4412 | N/A | 0.8 |
| E35D/M47I/L65P/D90N | 1096 | 4411 | 0.0 | 2526 | 0.10 | 4034 | N/A | 1.7 |
| L25S/E35D/M47I/D90N | 1097 | 61265 | 0.4 | 4845 | 0.20 | 20902 | N/A | 12.6 |
| Q27X*/S44P/I67T/P74S/ | 1098 | 195637 | 1.2 | 17524 | 0.71 | 17509 | N/A | 11.2 |
| E81G/E95D | | | | | | | | |
| A71D | 1099 | 220090 | 1.4 | 16785 | 0.68 | 29642 | N/A | 13.1 |
| T13A/Q27X*/I61N/A71D | 1100 | 195061 | 1.2 | 17519 | 0.71 | 21717 | N/A | 11.1 |
| E81K/A91S | 1101 | 98467 | 0.6 | 3309 | 0.13 | 44557 | N/A | 29.8 |
| A12V/M47V/L70M | 1102 | 81616 | 0.5 | 7400 | 0.30 | 31077 | N/A | 11.0 |
| K34E/T41A/L72V | 1103 | 88982 | 0.6 | 3755 | 0.15 | 35293 | N/A | 23.7 |
| T41S/A71D/V84A | 1104 | 103010 | 0.6 | 5573 | 0.22 | 83541 | N/A | 18.5 |
| E35D/A71D | 1105 | 106069 | 0.7 | 18206 | 0.73 | 40151 | N/A | 5.8 |
| E35D/M47I | 1106 | 353590 | 2.2 | 14350 | 0.58 | 149916 | N/A | 24.6 |
| K36R/G78A | 1107 | 11937 | 0.1 | 2611 | 0.11 | 5715 | N/A | 4.6 |
| Q33E/T41A | 1108 | 8292 | 0.1 | 2442 | 0.10 | 3958 | N/A | 3.4 |
| M47V/N48H | 1109 | 207012 | 1.3 | 14623 | 0.59 | 145529 | N/A | 14.2 |
| M47L/V68A | 1110 | 74238 | 0.5 | 13259 | 0.53 | 11223 | N/A | 5.6 |
| S44P/A71D | 1111 | 8839 | 0.1 | 2744 | 0.11 | 6309 | N/A | 3.2 |
| Q27H/M43I/A71D/R73S | 1112 | 136251 | 0.8 | 12391 | 0.50 | 8242 | N/A | 11.0 |
| E35D/T57I/L70Q/A71D | 1114 | 121901 | 0.8 | 21284 | 0.86 | 2419 | N/A | 5.7 |
| M47I/E88D | 1115 | 105192 | 0.7 | 7337 | 0.30 | 97695 | N/A | 14.3 |
| M42I/I61V/A71D | 1116 | 54478 | 0.3 | 6074 | 0.24 | 4226 | N/A | 9.0 |
| P51A/A71D | 1117 | 67256 | 0.4 | 4262 | 0.17 | 5532 | N/A | 15.8 |
| H18Y/M47I/T57I/A71G | 1118 | 136455 | 0.8 | 20081 | 0.81 | 13749 | N/A | 6.8 |
| V20I/M47V/T57I/V84I | 1119 | 183516 | 1.1 | 26922 | 1.08 | 3583 | N/A | 6.8 |
| WT | 2030 | 161423 | 1.0 | 24836 | 1.00 | Not | N/A | 6.5 |
| | | | | | | tested | | |

*Stop codon at indicated position

TABLE 13B
Variant CD80 Binding to HEK293 Cells Transfected with CTLA4, CD28 or PD-L1

| | | CTLA4 | | CD28 | | PD-L1 | | |
|---|---|---|---|---|---|---|---|---|
| | SEQ ID | MFI at | Fold | MFI | Fold | MFI at | Fold | Ratio of |
| | NO | 66.6 | change | at 66.6 | change | 22.2 | change | CTLA4: |
| CD80 mutation(s) | (IgV) | nM | to WT | nM | to WT | nM | to WT | CD28 |
| V20I/M47V/A71D | 1120 | 149937 | 7.23 | 15090 | 9.33 | 9710 | 5.48 | 9.9 |
| A71D/L72V/E95K | 1121 | 140306 | 6.77 | 6314 | 3.90 | 8417 | 4.75 | 22.2 |
| V22L/E35G/A71D/L72P | 1122 | 152588 | 7.36 | 8150 | 5.04 | 1403 | 0.79 | 18.7 |
| E35D/A71D | 1123 | 150330 | 7.25 | 14982 | 9.26 | 13781 | 7.77 | 10.0 |
| E35D/I67L/A71D | 1124 | 146087 | 7.04 | 11175 | 6.91 | 9354 | 5.28 | 13.1 |
| T13R/M42V/M47I/A71D | 1126 | 108900 | 5.25 | 16713 | 10.33 | 1869 | 1.05 | 6.5 |
| E35D | 1127 | 116494 | 5.62 | 3453 | 2.13 | 25492 | 14.38 | 33.7 |
| E35D/M47I/L70M | 1128 | 116531 | 5.62 | 14395 | 8.90 | 49131 | 27.71 | 8.1 |
| E35D/A71/L72V | 1129 | 134252 | 6.47 | 11634 | 7.19 | 13125 | 7.40 | 11.5 |
| E35D/M43L/L70M | 1130 | 102499 | 4.94 | 3112 | 1.92 | 40632 | 22.92 | 32.9 |
| A26P/E35D/M43I/L85Q/ | 1131 | 83139 | 4.01 | 5406 | 3.34 | 9506 | 5.36 | 15.4 |
| E88D | | | | | | | | |
| E35D/D46V/L85Q | 1132 | 85989 | 4.15 | 7510 | 4.64 | 38133 | 21.51 | 11.4 |
| Q27L/E35D/M47I/T57I/ | 1133 | 59793 | 2.88 | 14011 | 8.66 | 1050 | 0.59 | 4.3 |
| L70Q/E88D | | | | | | | | |
| Q27H/E35G/A71D/L72P/ | 1125 | 85117 | 4.10 | 10317 | 6.38 | 1452 | 0.82 | 8.3 |
| T79I | | | | | | | | |
| M47V/I69F/A71D/V83I | 1134 | 76944 | 3.71 | 15906 | 9.83 | 3399 | 1.92 | 4.8 |
| E35D/T57A/A71D/L85Q | 1135 | 85724 | 4.13 | 3383 | 2.09 | 1764 | 0.99 | 25.3 |
| H18Y/A26T/E35D/A71D/ | 1136 | 70878 | 3.42 | 6487 | 4.01 | 8026 | 4.53 | 10.9 |
| L85Q | | | | | | | | |
| E35D/M47L | 1137 | 82410 | 3.97 | 11508 | 7.11 | 58645 | 33.08 | 7.2 |
| E23D/M42V/M43I/I58V/ | 1138 | 37331 | 1.80 | 10910 | 6.74 | 2251 | 1.27 | 3.4 |
| L70R | | | | | | | | |
| V68M/L70M/A71D/E95K | 1139 | 56479 | 2.72 | 10541 | 6.51 | 38182 | 21.53 | 5.4 |
| N55I/T57I/I69F | 1140 | 2855 | 0.14 | 1901 | 1.17 | 14759 | 8.32 | 1.5 |
| E35D/M43I/A71D | 1141 | 63789 | 3.08 | 6369 | 3.94 | 27290 | 15.39 | 10.0 |
| T41S/T57I/L70R | 1142 | 59844 | 2.89 | 4902 | 3.03 | 19527 | 11.01 | 12.2 |
| H18Y/A71D/L72P/E88V | 1143 | 68391 | 3.30 | 8862 | 5.48 | 1085 | 0.61 | 7.7 |
| V20I/A71D | 1144 | 60323 | 2.91 | 10500 | 6.49 | 3551 | 2.00 | 5.7 |
| E23G/A26S/E35D/T62N/ | 1145 | 59025 | 2.85 | 5484 | 3.39 | 10662 | 6.01 | 10.8 |
| A71D/L72V/L85M | | | | | | | | |
| A12T/E24D/E35D/D46V/ | 1146 | 63738 | 3.07 | 7411 | 4.58 | 1221 | 0.69 | 8.6 |
| I61V/L72P/E95V | | | | | | | | |
| V22L/E35D/M43L/A71G/ | 1147 | 2970 | 0.14 | 1498 | 0.93 | 1851 | 1.04 | 2.0 |
| D76H | | | | | | | | |
| E35G/K54E/A71D/L72P | 1148 | 71899 | 3.47 | 3697 | 2.29 | 1575 | 0.89 | 19.4 |
| L70Q/A71D | 1149 | 45012 | 2.17 | 18615 | 11.50 | 1692 | 0.95 | 2.4 |
| A26E/E35D/M47L/L85Q | 1150 | 40325 | 1.94 | 2266 | 1.40 | 55548 | 31.33 | 17.8 |
| D46E/A71D | 1151 | 69674 | 3.36 | 16770 | 10.36 | 22777 | 12.85 | 4.2 |
| Y31H/E35D/T41S/V68L/ | 1152 | 3379 | 0.16 | 2446 | 1.51 | 18863 | 10.64 | 1.4 |
| K93R/R94W | | | | | | | | |
| WT CD80 IgV Fc | 2030 | 20739 | 1.00 | 1618 | 1.00 | 1773 | 1.00 | 12.8 |
| | (IgV) | | | | | | | |
| WT CD80 ECD Fc | — | 72506 | 3.50 | 3072 | 1.90 | 4418 | 2.49 | 23.6 |

TABLE 14A
Variant CD155 selected against cognate binding partners. Molecule sequences, binding,
data and costimulatory bioactivity data.

| | | | | | Mock | Anti-CD3 |
|---|---|---|---|---|---|---|
| | | CD226 | TIGIT | CD96 | Expi293 | IFN-gamma |
| | | tfxn MFI | tfxn MFI | MFI | MFI | (pg/mL) |
| | | (CD226 | (TIGIT | (CD96 | (Mock | (Anti-CD3 |
| | | MFI | MFI | MFI | MFI | IFN-gamma |
| | SEQ ID | parental | parental | parental | parental | parental |
| CD155 mutations | NO (IgV) | ratio) | ratio) | ratio) | ratio) | ratio) |
| P18S, P64S, F91S | 354 | 497825 | 247219 | 140065 | 3528 | 270.1 |
| | | (133.7) | (91.1) | (45.4) | (1.2) | (0.7) |
| P18S, F91S, L104P | 355 | 26210 | 75176 | 10867 | 2130 | 364.2 |
| | | (7.0) | (27.7) | (3.5) | (0.7) | (0.9) |
| L44P | 356 | 581289 | 261931 | 152252 | 3414 | 277.6 |
| | | (156.1) | (96.5) | (49.4) | (1.2) | (0.7) |
| A56V | 357 | 455297 | 280265 | 161162 | 2601 | 548.2 |
| | | (122.3) | (103.2) | (52.2) | (0.9) | (1.4) |
| P18L, L79V, F91S | 358 | 5135 | 4073 | 3279 | 2719 | 1241.5 |
| | | (1.4) | (1.5) | (1.1) | (0.9) | (3.2) |
| P18S, F91S | 359 | 408623 | 284190 | 147463 | 3348 | 760.6 |
| | | (109.8) | (104.7) | (47.8) | (1.1) | (2.0) |
| P18T, F91S | 360 | 401283 | 223985 | 157644 | 3065 | 814.7 |
| | | (107.8) | (82.5) | (51.1) | (1.1) | (2.1) |
| P18T, S42P, F91S | 361 | 554105 | 223887 | 135395 | 3796 | 539.7 |
| | | (148.8) | (82.5) | (43.9) | (1.3) | (1.4) |
| G7E, P18T, Y30C, F91S | 362 | 12903 | 12984 | 7906 | 2671 | 275.9 |
| | | (3.5) | (4.8) | (2.6) | (0.9) | (0.7) |
| P18T, F91S, G111D | 363 | 438327 | 287315 | 167583 | 4012 | 307.2 |
| | | (117.7) | (105.8) | (54.3) | (1.4) | (0.8) |
| P18S, F91P | 364 | 4154 | 3220 | 2678 | 2816 | 365.7 |
| | | (1.1) | (1.2) | (0.9) | (1.0) | (0.9) |
| P18T, F91S, F108L | 365 | 394546 | 298680 | 193122 | 2926 | 775.4 |
| | | (106.0) | (110.0) | (62.6) | (1.0) | (2.0) |
| P18T, T45A, F91S | 366 | 435847 | 222044 | 191026 | 2948 | 1546.8 |
| | | (H7.1) | (81.8) | (61.9) | (1.0) | (4.0) |
| P18T, F91S, R94H | 367 | 3589 | 2942 | 2509 | 2390 | 1273.2 |
| | | (1.0) | (1.1) | (0.8) | (0.8) | (3.3) |
| P18S, Y30C, F91S | 368 | 382352 | 276358 | 56934 | 3540 | 426.5 |
| | | (102.7) | (101.8) | (18.5) | (1.2) | (1.1) |
| A81V, L83P | 369 | 4169 | 2912 | 2616 | 2993 | 339.7 |
| | | (1.1) | (1.1) | (0.8) | (1.0) | (0.9) |
| L88P | 370 | 65120 | 74845 | 35280 | 2140 | 969.2 |
| | | (17.5) | (27.6) | (11.4) | (0.7) | (2.5) |
| Wild type | 353 | 3723 | 2715 | 3085 | 2913 | 389.6 |
| | | (1.0) | (1.0) | (1.0) | (1.0) | (1.0) |
| R94H | 371 | 18905 | 104013 | 11727 | 1663 | 372.6 |
| | | (5.1) | (38.3) | (3.8) | (0.6) | (1.0) |
| A13E, P18S, A56V, | 372 | 357808 | 179060 | 118570 | 2844 | 349.2 |
| F91S | | (96.1) | (66.0) | (38.4) | (1.0) | (0.9) |
| P18T, F91S, V115A | 373 | 38487 | 46313 | 22718 | 2070 | 1574.5 |
| | | (10.3) | (17.1) | (7.4) | (0.7) | (4.0) |
| P18T, Q60K | 374 | 238266 | 173730 | 154448 | 4778 | 427.2 |
| | | (64.0) | (64.0) | (50.1) | (1.6) | (1.1) |

TABLE 14B
Additional CD155 Variants and Binding Data.

| | | TIGIT | | CD226 | | CD112R | | CD96 | |
|---|---|---|---|---|---|---|---|---|---|
| | SEQ | | Fold ↑ | | Fold ↑ | | Fold ↑ | | Fold ↑ |
| | ID NO | MFI at | to WT | MFI at | to WT | MFI at | to WT | MFI at | to WT |
| CD155 Mutation(s) | (IgV) | 100 nM | ECD | 100 nM | ECD | 100 nM | ECD | 100 nM | ECD |
| S52M | 569 | 1865.3 | 0.00 | 1901.0 | 0.01 | 1553.4 | 0.87 | 1609.8 | 0.02 |
| T45Q, S52L, L104E, | 570 | 2287.0 | 0.01 | 2390.4 | 0.01 | 1735.1 | 0.97 | 1575.1 | 0.02 |
| G111R | | | | | | | | | |
| S42G | 571 | 4837.5 | 0.01 | 2448.1 | 0.01 | 1815.4 | 1.02 | 1699.6 | 0.02 |
| Q62F | 572 | 2209.5 | 0.01 | 2572.1 | 0.01 | 2706.5 | 1.52 | 2760.7 | 0.03 |
| S52Q | 573 | 2288.1 | 0.01 | 2022.3 | 0.01 | 1790.1 | 1.00 | 1822.3 | 0.02 |
| S42A, L104Q, G111R | 574 | 1923.7 | 0.00 | 1901.7 | 0.01 | 1815.1 | 1.02 | 1703.8 | 0.02 |
| S42A, S52Q, L104Q, | 575 | 1807.5 | 0.00 | 2157.2 | 0.01 | 1894.4 | 1.06 | 1644.0 | 0.02 |
| G111R | | | | | | | | | |
| S52W, L104E | 576 | 1938.2 | 0.00 | 1905.6 | 0.01 | 2070.6 | 1.16 | 1629.5 | 0.02 |
| S42C | 577 | 1914.0 | 0.00 | 2096.1 | 0.01 | 1685.0 | 0.95 | 1592.4 | 0.02 |
| S52W | 578 | 1991.6 | 0.00 | 2037.3 | 0.01 | 1612.8 | 0.90 | 1712.9 | 0.02 |
| S52M, L104Q | 579 | 2666.6 | 0.01 | 2252.2 | 0.01 | 1706.0 | 0.96 | 1633.1 | 0.02 |
| S42L, S52L, Q62F, | 580 | 2021.4 | 0.00 | 2643.8 | 0.02 | 1730.1 | 0.97 | 2318.7 | 0.02 |
| L104Q | | | | | | | | | |
| S42W | 581 | 2434.5 | 0.01 | 2133.4 | 0.01 | 2325.7 | 1.30 | 2555.4 | 0.03 |
| S42Q | 582 | 2073.5 | 0.00 | 2225.9 | 0.01 | 1905.1 | 1.07 | 2143.1 | 0.02 |
| S52L | 583 | 2224.8 | 0.01 | 2676.3 | 0.02 | 2038.6 | 1.14 | 2043.2 | 0.02 |
| S52R | 584 | 4395.4 | 0.01 | 3964.4 | 0.02 | 2741.7 | 1.54 | 4846.9 | 0.05 |
| L104E | 585 | 3135.4 | 0.01 | 2264.2 | 0.01 | 1803.5 | 1.01 | 1556.7 | 0.02 |
| G111R | 586 | 2082.7 | 0.00 | 2791.3 | 0.02 | 2470.9 | 1.39 | 3317.1 | 0.03 |
| S52E | 587 | 2655.4 | 0.01 | 2599.8 | 0.02 | 1904.9 | 1.07 | 1799.0 | 0.02 |
| Q62Y | 588 | 2528.6 | 0.01 | 2621.4 | 0.02 | 1918.4 | 1.08 | 1827.5 | 0.02 |
| T45Q, S52M, L104E | 589 | 79498.2 | 0.19 | 143238.5 | 0.83 | 2600.6 | 1.46 | 6310.4 | 0.06 |
| S42N, L104Q, G111R | 590 | 2432.1 | 0.01 | 2311.3 | 0.01 | 1847.4 | 1.04 | 1958.3 | 0.02 |
| S52M, V57L | 591 | 1760.7 | 0.00 | 2431.6 | 0.01 | 2006.9 | 1.13 | 1858.7 | 0.02 |
| S42N, S52Q, Q62F | 592 | 2402.7 | 0.01 | 2152.0 | 0.01 | 1855.0 | 1.04 | 1737.6 | 0.02 |
| S42A, S52L, L104E, | 593 | 2262.7 | 0.01 | 1889.4 | 0.01 | 1783.2 | 1.00 | 1606.2 | 0.02 |
| G111R | | | | | | | | | |
| S42W, S52Q, V57L, | 594 | 1961.4 | 0.00 | 2138.3 | 0.01 | 1844.9 | 1.03 | 1699.6 | 0.02 |
| Q62Y | | | | | | | | | |
| L104Q | 595 | 10314.4 | 0.02 | 3791.4 | 0.02 | 2119.9 | 1.19 | 1542.6 | 0.02 |
| S42L, S52Q, L104E | 596 | 1946.9 | 0.00 | 6474.3 | 0.04 | 1749.0 | 0.98 | 1702.2 | 0.02 |
| S42C, S52L | 597 | 1762.5 | 0.00 | 2147.3 | 0.01 | 1663.4 | 0.93 | 1484.7 | 0.01 |
| S42W, S52R, Q62Y, | 598 | 1918.8 | 0.00 | 2300.1 | 0.01 | 1824.6 | 1.02 | 1756.0 | 0.02 |
| L104Q | | | | | | | | | |
| T45Q, S52R, L104E | 599 | 121636.9 | 0.29 | 142381.2 | 0.82 | 2617.9 | 1.47 | 3748.2 | 0.04 |
| S52R, Q62F, L104Q, | 600 | 2969.2 | 0.01 | 3171.6 | 0.02 | 1725.4 | 0.97 | 2362.3 | 0.02 |
| G111R | | | | | | | | | |
| T45Q, S52L, V57L, | 601 | 2857.7 | 0.01 | 5943.5 | 0.03 | 1496.8 | 0.84 | 1533.3 | 0.02 |
| L104E | | | | | | | | | |
| S52M, Q62Y | 602 | 1926.6 | 0.00 | 2000.3 | 0.01 | 1771.6 | 0.99 | 1651.1 | 0.02 |
| Q62F, L104E, G111R | 603 | 1966.4 | 0.00 | 2043.5 | 0.01 | 1701.9 | 0.95 | 1524.8 | 0.02 |
| T45Q, S52Q | 604 | 4812.8 | 0.01 | 5787.5 | 0.03 | 1765.6 | 0.99 | 2451.3 | 0.02 |
| S52L, L104E | 605 | 4317.8 | 0.01 | 2213.9 | 0.01 | 1756.9 | 0.99 | 1829.3 | 0.02 |
| S42V, S52E | 606 | 2055.0 | 0.00 | 2272.6 | 0.01 | 1808.0 | 1.01 | 2530.2 | 0.03 |
| T45Q, S52R, G111R | 607 | 4092.3 | 0.01 | 2075.2 | 0.01 | 1793.6 | 1.01 | 2336.6 | 0.02 |
| S42G, S52Q, L104E, | 608 | 2010.1 | 0.00 | 2019.2 | 0.01 | 1706.4 | 0.96 | 1707.6 | 0.02 |
| G111R | | | | | | | | | |
| S42N, S52E, V57L, | 609 | 1784.2 | 0.00 | 1743.6 | 0.01 | 1690.1 | 0.95 | 1538.7 | 0.02 |
| L104E | | | | | | | | | |
| Wildtype | 353 | 1964.7 | 0.00 | 2317.1 | 0.01 | 2169.6 | 1.22 | 1893.4 | 0.02 |
| S42C, S52M, Q62F | 610 | 1861.0 | 0.00 | 2084.2 | 0.01 | 1592.3 | 0.89 | 1481.3 | 0.01 |
| S42L | 611 | 1930.4 | 0.00 | 2187.2 | 0.01 | 1743.2 | 0.98 | 1618.4 | 0.02 |
| Wildtype | 353 | 2182.6 | 0.01 | 2374.5 | 0.01 | 1743.1 | 0.98 | 1680.4 | 0.02 |
| S42A | 612 | 1929.2 | 0.00 | 2188.6 | 0.01 | 1733.7 | 0.97 | 1623.6 | 0.02 |
| S42G, S52L, Q62F, | 613 | 1924.3 | 0.00 | 2157.6 | 0.01 | 1661.3 | 0.93 | 1642.1 | 0.02 |
| L104Q | | | | | | | | | |
| S42N | 614 | 1817.4 | 0.00 | 1910.9 | 0.01 | 1699.7 | 0.95 | 1691.5 | 0.02 |
| CD155 IgV Fc | 353 | 4690 | 0.01 | 4690 | 0.03 | 2941 | 1.65 | 3272 | 0.03 |
| | (IgV) | | | | | | | | |
| Wildtype CD155 | 47 | 423797 | 1.00 | 172839 | 1.00 | 1783 | 1.00 | 99037 | 1.00 |
| ECD-Fc | (ECD) | | | | | | | | |
| Anti-human Fc PE | — | 1506.3 | 0.00 | 3774 | 0.02 | 1587 | 0.89 | 1618 | 0.02 |

TABLE 14C
Additional CD155 Variants and Binding Data.

| | | TIGIT | | CD226 | | CD96 | |
|---|---|---|---|---|---|---|---|
| | | | Fold | | Fold | | Fold |
| | SEQ | | Increase | | Increase | | Increase |
| | ID NO | MFI at | to WT | MFI at | to WT | MFI at | to WT |
| CD155 Mutation(s) | (IgV) | 100 nM | ECD | 100 nM | ECD | 100 nM | ECD |
| P18T, S65A, S67V, F91S | 615 | 297843 | 1.99 | 351195 | 3.22 | 128180 | 1.68 |
| P18T, T45Q, T61R, S65N, S67L | 617 | 224682 | 1.50 | 270175 | 2.48 | 22820 | 0.30 |
| P18F, T39A, T45Q, T61R, S65N, | 616 | Little to no protein produced | | | | | |
| S67L, E73G, R78G | | | | | | | |
| P18F, S65A, S67V, F91S | 618 | 534106 | 3.57 | 350410 | 3.21 | 144069 | 1.89 |
| P18F, T45Q, T61R, S65N, S67L, | 619 | Little to no protein produced | | | | | |
| F91S, L104P | | | | | | | |
| P18S, L79P, L104M | 620 | 342549 | 2.29 | 320823 | 2.94 | 107532 | 1.41 |
| P18S, L104M | 621 | 449066 | 3.00 | 295126 | 2.70 | 121266 | 1.59 |
| L79P, L104M | 622 | 3210 | 0.02 | 8323 | 0.08 | 2894 | 0.04 |
| P18T, T45Q, L79P | 623 | 542878 | 3.63 | 371498 | 3.40 | 193719 | 2.55 |
| P18T, T45Q, T61R, S65H, S67H | 624 | 312337 | 2.09 | 225439 | 2.07 | 152903 | 2.01 |
| P18T, A81E | 625 | Little to no protein produced | | | | | |
| P18S, D23Y, E37P, S52G, Q62M, | 626 | Little to no protein produced | | | | | |
| G80S, A81P, G99Y, S112N | | | | | | | |
| A13R, D23Y, E37P, S42P, Q62Y, | 627 | 4161 | 0.03 | 11673 | 0.11 | 5762 | 0.08 |
| A81E | | | | | | | |
| A13R, D23Y, E37P, G99Y, | 627 | Little to no protein produced | | | | | |
| S112N | | | | | | | |
| A13R, D23Y, E37P, Q62M, | 629 | Little to no protein produced | | | | | |
| A77V, G80S, A81P, G99Y | | | | | | | |
| P18L, E37S, Q62M, G80S, A81P, | 630 | 5900 | 0.04 | 14642 | 0.13 | 3345 | 0.04 |
| G99Y, S112N | | | | | | | |
| P18S, L104T | 631 | 321741 | 2.15 | 367470 | 3.37 | 108569 | 1.43 |
| P18S, Q62H, L79Q, F91S | 632 | 283357 | 1.89 | 324877 | 2.98 | 125541 | 1.65 |
| P18S, F91S | 359 | 222780 | 1.49 | 300049 | 2.75 | 48542 | 0.64 |
| T45Q, S52K, Q62F, L104Q, | 633 | Little to no protein produced | | | | | |
| G111R | | | | | | | |
| T45Q, S52Q, Q62Y, L104Q, | 634 | Little to no protein produced | | | | | |
| G111R | | | | | | | |
| T45Q, S52Q, Q62Y, L104E, | 635 | Little to no protein produced | | | | | |
| G111R | | | | | | | |
| V57A, T61M, S65W, S67A, | 636 | Little to no protein produced | | | | | |
| E96D, L104T | | | | | | | |
| P18L, V57T, T61S, S65Y, S67A, | 637 | 278178 | 1.86 | 276870 | 2.54 | 121499 | 1.60 |
| L104T | | | | | | | |
| P18T, T45Q | 638 | 326769 | 2.18 | 357515 | 3.28 | 92389 | 1.21 |
| P18L, V57A, T61M, S65W, | 639 | Little to no protein produced | | | | | |
| S67A, L104T | | | | | | | |
| T61M, S65W, S67A, L104T | 640 | 360915 | 2.41 | 417897 | 3.83 | 148954 | 1.96 |
| P18S, V41A, S42G, T45G, | 641 | 3821 | 0.03 | 11449 | 0.10 | 3087 | 0.04 |
| L104N | | | | | | | |
| P18H, S42G, T45I, S52T, G53R, | 642 | 5066 | 0.03 | 177351 | 1.63 | 3700 | 0.05 |
| S54H, V57L, H59E, T61S, S65D, | | | | | | | |
| E68G, L104N | | | | | | | |
| P18S, S42G, T45V, F58L, S67W, | 643 | 14137 | 0.09 | 15175 | 0.14 | 15324 | 0.20 |
| L104N | | | | | | | |
| P18S, T45I, L104N | 644 | 141745 | 0.95 | 298011 | 2.73 | 97246 | 1.28 |
| P18S, S42G, T45G, L104N, | 645 | 29387 | 0.20 | 117965 | 1.08 | 15884 | 0.21 |
| V106A | | | | | | | |
| P18H, H40R, S42G, T45I, S52T, | 646 | 12335 | 0.08 | 14657 | 0.13 | 15779 | 0.21 |
| G53R, S54H, V57L, H59E, T61S, | | | | | | | |
| S65D, E68G, L104Y, V106L, | | | | | | | |
| F108H | | | | | | | |
| E37V, S42G, T45G, L104N | 647 | Little to no protein produced | | | | | |
| P18S, T45Q, L79P, L104T | 648 | 206674 | 1.38 | 285512 | 2.62 | 87790 | 1.15 |
| P18L, Q62R | 649 | 66939 | 0.45 | 25063 | 0.23 | 10928 | 0.14 |
| A13R, D23Y, E37P, S42L, S52G, | 650 | Little to no protein produced | | | | | |
| Q62Y, A81E | | | | | | | |
| P18L, H49R, L104T, D116N | 651 | 167980 | 1.12 | 214677 | 1.97 | 62451 | 0.82 |
| A13R, D23Y, E37P, Q62M, | 652 | Little to no protein produced | | | | | |
| G80S, A81P, L104T | | | | | | | |
| S65T, L104T | 653 | 205942 | 1.38 | 187147 | 1.71 | 65207 | 0.86 |
| A13R, D23Y, E37P, S52G, | 654 | Little to no protein produced | | | | | |
| V57A, Q62M, K70E, L104T | | | | | | | |
| P18L, A47V, Q62Y, E73D, | 655 | 146142 | 0.98 | 248926 | 2.28 | 73956 | 0.97 |
| L104T | | | | | | | |
| H40T, V41M, A47V, S52Q, | 656 | Little to no protein produced | | | | | |
| Q62L, S65T, E73R, D97G, E98S, | | | | | | | |
| L104T, D116N | | | | | | | |
| P18L, S42P, T45Q, T61G, S65H, | 657 | 153536 | 1.03 | 402503 | 3.69 | 53044 | 0.70 |
| S67E, L104T, D116N | | | | | | | |
| P18S, H40T, V41M, A47V, | 658 | Little to no protein produced | | | | | |
| S52Q, Q62L, S65T, E73R, | | | | | | | |
| L104M, V106A | | | | | | | |
| H40T, V41M, A47V, S52Q, | 659 | Little to no protein produced | | | | | |
| Q62L, S65T, E68G, E73R, D97G, | | | | | | | |
| E98S, L104T | | | | | | | |
| T45Q, S52E, L104E | 660 | Little to no protein produced | | | | | |
| T45Q, S52E, Q62F, L104E | 661 | 132850 | 0.89 | 276434 | 2.53 | 14558 | 0.19 |
| Wildtype CD155 ECD-Fc | 47 | 149692 | 1.00 | 109137 | 1.00 | 76083 | 1.00 |
| | (ECD) | | | | | | |
| Anti-human Fc PE | — | 2287 | 0.02 | 4799 | 0.04 | 2061 | 0.03 |

TABLE 14D
Additional CD155 Variants and Binding Data.

| | | TIGIT | | CD226 | | CD96 | |
|---|---|---|---|---|---|---|---|
| | | | Fold | | Fold | | Fold |
| | SEQ ID | | Increase | | Increase | | Increase |
| | NO | MFI at | to WT | MFI at | to WT | MFI at | to WT |
| CD155 Mutations | (IgV) | 100 nM | IgV | 100 nM | IgV | 100 nM | IgV |
| P18F, T26M, L44V, | 662 | 117327 | 1.2 | 1613 | 0.1 | 1629 | 0.1 |
| Q62K, L79P, F91S, | | | | | | | |
| L104M, G111D | | | | | | | |
| P18S, T45S, T61K, | 663 | 124936 | 1.3 | 2114 | 0.1 | 2223 | 0.1 |
| S65W, S67A, F91S, | | | | | | | |
| G111R | | | | | | | |
| P18S, L79P, | 664 | 110512 | 1.1 | 18337 | 0.9 | 22793 | 1.3 |
| L104M, T107M | | | | | | | |
| P18S, S65W, S67A, | 665 | 101726 | 1.0 | 1605 | 0.1 | 2571 | 0.1 |
| M90V, V95A, | | | | | | | |
| L104Q, G111R | | | | | | | |
| Wildtype CD155- | 47 | 98935 | 1.0 | 20029 | 1.0 | 17410 | 1.0 |
| ECD | (ECD) | | | | | | |

TABLE 14E
Additional CD155 Variants and Binding Data.

| | | TIGIT | | CD226 | | CD96 | |
|---|---|---|---|---|---|---|---|
| | | | Fold | | Fold | | Fold |
| | | | Change | | Change | | Change |
| | SEQ ID | | from | | from | | from |
| | NO | MFI at | CD155- | MFI at | CD155- | MFI at | CD155- |
| CD155 Mutations | (IgV) | 11.1 nM | ECD | 11.1 nM | ECD | 11.1 nM | ECD |
| P18S, A47G, L79P, F91S, | 1528 | 56,409 | 1.19 | 1,191 | 0.08 | 25,362 | 1.49 |
| L104M, T107A, R113W | | | | | | | |
| P18T, D23G, S24A, N35D, | 1529 | 128,536 | 2.72 | 987 | 0.06 | 3,497 | 0.20 |
| H49L, L79P, F91S, L104M, | | | | | | | |
| G111R | | | | | | | |
| V9L, P18S, Q60R, V75L, | 1530 | 125,329 | 2.65 | 986 | 0.06 | 959 | 0.06 |
| L79P, R89K, F91S, L104E, | | | | | | | |
| G111R | | | | | | | |
| P18S, H49R, E73D, L79P, | 1531 | Little to no protein produced | | | | | |
| N85D, F91S, V95A, | | | | | | | |
| L104M, G111R | | | | | | | |
| V11A, P18S, L79P, F91S, | 1532 | 48,246 | 1.02 | 974 | 0.06 | 923 | 0.05 |
| L104M, G111R | | | | | | | |
| V11A, P18S, S54R, Q60P, | 1533 | 190,392 | 4.02 | 1,019 | 0.07 | 1,129 | 0.07 |
| Q62K, L79P, N85D, F91S, | | | | | | | |
| T107M | | | | | | | |
| P18T, S52P, S65A, S67V, | 1534 | 121,611 | 2.57 | 986 | 0.06 | 16,507 | 0.97 |
| L79P, F91S, L104M, | | | | | | | |
| G111R | | | | | | | |
| P18T, M36T, L79P, F91S, | 1535 | 150,015 | 3.17 | 1,029 | 0.07 | 2,514 | 0.15 |
| G111R | | | | | | | |
| D8G, P18S, M36I, V38A, | 1536 | 79,333 | 1.68 | 1,026 | 0.07 | 2,313 | 0.14 |
| H49Q, A76E, F91S, | | | | | | | |
| L104M, T107A, R113W | | | | | | | |
| P18S, S52P, S65A, S67V, | 1537 | 23,766 | 0.50 | 1,004 | 0.07 | 1,080 | 0.06 |
| L79P, F91S, L104M, | | | | | | | |
| T107S, R113W | | | | | | | |
| T15I, P18T, L79P, F91S, | 1538 | 55,498 | 1.17 | 1,516 | 0.10 | 1,030 | 0.06 |
| L104M, G111R | | | | | | | |
| P18F, T26M, L44V, Q62K, | 1539 | 213,640 | 4.51 | 991 | 0.06 | 1,276 | 0.07 |
| L79P, E82D, F91S, L104M, | | | | | | | |
| G111D | | | | | | | |
| P18T, E37G, G53R, Q62K, | 1540 | 251,288 | 5.31 | 2,001 | 0.13 | 45,878 | 2.69 |
| L79P, F91S, E98D, L104M, | | | | | | | |
| T107M | | | | | | | |
| P18L, K70E, L79P, F91S, | 1541 | 62,608 | 1.32 | 1,117 | 0.07 | 973 | 0.06 |
| V95A, G111R | | | | | | | |
| V9I, Q12K, P18F, S65A, | 1542 | 81,932 | 1.73 | 803 | 0.05 | 68,295 | 4.00 |
| S67V, L79P, L104T, | | | | | | | |
| G111R, S112I | | | | | | | |
| P18F, S65A, S67V, F91S, | 1543 | 30,661 | 0.65 | 901 | 0.06 | 3,193 | 0.19 |
| L104M, G111R | | | | | | | |
| V9I, V10I, P18S, F20S, | 1544 | 151,489 | 3.20 | 973 | 0.06 | 974 | 0.06 |
| T45A, L79P, F91S, L104M, | | | | | | | |
| F108Y, G111R, S112V | | | | | | | |
| V9L, P18L, L79P, M90I, | 1545 | 155,279 | 3.28 | 910 | 0.06 | 10,568 | 0.62 |
| F91S, T102S, L104M, | | | | | | | |
| G111R | | | | | | | |
| P18C, T26M, L44V, M55I, | 1546 | 137,521 | 2.91 | 973 | 0.06 | 111,085 | 6.51 |
| Q62K, L79P, F91S, L104M, | | | | | | | |
| T107M | | | | | | | |
| V9I, P18T, D23G, L79P, | 1547 | 151,426 | 3.20 | 897 | 0.06 | 2,725 | 0.16 |
| F91S, G111R | | | | | | | |
| P18F, L79P, M90L, F91S, | 1548 | 125,639 | 2.66 | 917 | 0.06 | 3,939 | 0.23 |
| V95A, L104M, G111R | | | | | | | |
| P18F, L79P, M90L, F91S, | 1548 | 115,156 | 2.43 | 1,073 | 0.07 | 2,464 | 0.14 |
| V95A, L104M, G111R | | | | | | | |
| P18T, M36T, S65A, S67E, | 1549 | 10,616 | 0.22 | 1,130 | 0.07 | 963 | 0.06 |
| L79Q, A81T, F91S, G111R | | | | | | | |
| V9L, P18T, Q62R, L79P, | 1550 | 195,111 | 4.12 | 835 | 0.05 | 1,497 | 0.09 |
| F91S, L104M, G111R | | | | | | | |
| CD155-ECD-Fc | 47 | 47,319 | 1.00 | 15,421 | 1.00 | 17,067 | 1.00 |
| | (ECD) | | | | | | |
| Fc Control | 1155 | 2,298 | 0.05 | 1,133 | 0.07 | 996 | 0.06 |

TABLE 14F
Additional CD155 Variants and Binding Data.

| | | TIGIT | | CD226 | | CD112R | | CD96 | |
|---|---|---|---|---|---|---|---|---|---|
| | | | Fold | | Fold | | Fold | | Fold |
| | | | Change | | Change | | Change | | Change |
| | SEQ | | from | | from | | from | | from |
| | ID NO | MFI at | CD155- | MFI at | CD155- | MFI at | CD155- | MFI at | CD155- |
| CD155 Mutations | (IgV) | 25 nM | ECD | 25 nM | ECD | 25 nM | ECD | 25 nM | ECD |
| P18T, G19D, M36T, S54N, | 1669 | 905 | 0.02 | 748 | 0.02 | 1276 | 1.56 | 726 | 0.01 |
| L79P, L83Q, F91S, T107M, | | | | | | | | | |
| F108Y | | | | | | | | | |
| V9L, P18L, M55V, S69L, | 1670 | 58656 | 1.34 | 11166 | 0.29 | 920 | 1.13 | 67364 | 1.39 |
| L79P, A81E, F91S, T107M | | | | | | | | | |
| P18F, H40Q, T61K, Q62K, | 1671 | 108441 | 2.48 | 853 | 0.02 | 918 | 1.13 | 8035 | 0.17 |
| L79P, F91S, L104M, | | | | | | | | | |
| T107V | | | | | | | | | |
| P18S, Q32R, Q62K, R78G, | 1672 | 5772 | 0.13 | 701 | 0.02 | 843 | 1.03 | 831 | 0.02 |
| L79P, F91S, T107A, | | | | | | | | | |
| R113W | | | | | | | | | |
| Q12H, P18T, L21S, G22S, | 1673 | 1084 | 0.02 | 687 | 0.02 | 876 | 1.07 | 818 | 0.02 |
| V57A, Q62R, L79P, F91S, | | | | | | | | | |
| T107M | | | | | | | | | |
| V9I, P18S, S24P, H49Q, | 1674 | 69926 | 1.60 | 1089 | 0.03 | 1026 | 1.26 | 43856 | 0.90 |
| F58Y, Q60R, Q62K, L79P, | | | | | | | | | |
| F91S, T107M | | | | | | | | | |
| P18T, W46C, H49R, S65A, | 1675 | 918 | 0.02 | 640 | 0.02 | 803 | 0.98 | 717 | 0.01 |
| S67V, A76T, L79P, S87T, | | | | | | | | | |
| L104M | | | | | | | | | |
| P18S, S42T, E51G, L79P, | 1676 | 12630 | 0.29 | 707 | 0.02 | 857 | 1.05 | 1050 | 0.02 |
| F91S, G92W, T107M | | | | | | | | | |
| P18S, S42T, E51G, L79P, | 1676 | 7476 | 0.17 | 851 | 0.02 | 935 | 1.15 | 924 | 0.02 |
| F91S, G92W, T107M | | | | | | | | | |
| V10F, T15S, P18L, R48Q, | 1677 | 1168 | 0.03 | 792 | 0.02 | 901 | 1.10 | 998 | 0.02 |
| L79P, F91S, T107M, | | | | | | | | | |
| V115M | | | | | | | | | |
| P18S, L21M, Y30F, N35D, | 1678 | 1377 | 0.03 | 743 | 0.02 | 946 | 1.16 | 1033 | 0.02 |
| R84W, F91S, T107M, | | | | | | | | | |
| D116G | | | | | | | | | |
| P18F, E51V, S54G, Q60R, | 1679 | 46090 | 1.05 | 15701 | 0.41 | 1012 | 1.24 | 61814 | 1.27 |
| L79Q, E82G, S87T, M90I, | | | | | | | | | |
| F91S, G92R, T107M | | | | | | | | | |
| Q16H, P18F, F91S, T107M | 1680 | Little to no protein produced | | | | | | | |
| P18T, D23G, Q60R, S67L, | 1681 | 64091 | 1.47 | 30931 | 0.81 | 874 | 1.07 | 108875 | 2.24 |
| L79P, F91S, T107M, | | | | | | | | | |
| V115A | | | | | | | | | |
| D8G, V9I, V11A, P18T, | 1682 | 52508 | 1.20 | 9483 | 0.25 | 817 | 1.00 | 97770 | 2.01 |
| T26M, S52P, L79P, F91S, | | | | | | | | | |
| G92A, T107L, V115A | | | | | | | | | |
| V9I, P18F, A47E, G50S, | 1683 | 55167 | 1.26 | 54341 | 1.43 | 752 | 0.92 | 102115 | 2.10 |
| E68G, L79P, F91S, T107M | | | | | | | | | |
| P18S, M55I, Q62K, S69P, | 1684 | Little to no protein produced | | | | | | | |
| L79P, F91S, T107M | | | | | | | | | |
| P18T, T39S, S52P, S54R, | 1685 | 45927 | 1.05 | 744 | 0.02 | 1038 | 1.27 | 1225 | 0.03 |
| L79P, F91S, T107M | | | | | | | | | |
| P18S, D23N, L79P, F91S, | 1686 | Little to no protein produced | | | | | | | |
| T107M, S114N | | | | | | | | | |
| P18S, P34S, E51V, L79P, | 1687 | 7917 | 0.18 | 769 | 0.02 | 853 | 1.04 | 892 | 0.02 |
| F91S, G111R | | | | | | | | | |
| P18S, H59N, V75A, L79P, | 1688 | 800 | 0.02 | 676 | 0.02 | 915 | 1.12 | 759 | 0.02 |
| A81T, F91S, L104M, | | | | | | | | | |
| T107M | | | | | | | | | |
| P18S, W46R, E68D, L79P, | 1689 | 1359 | 0.03 | 717 | 0.02 | 798 | 0.98 | 737 | 0.02 |
| F91S, T107M, R113G | | | | | | | | | |
| V9L, P18F, T45A, S65A, | 1690 | 130274 | 2.98 | 153569 | 4.04 | 812 | 1.00 | 85605 | 1.76 |
| S67V, R78K, L79V, F91S, | | | | | | | | | |
| T107M, S114T | | | | | | | | | |
| P18T, M55L, T61R, L79P, | 1691 | 133399 | 3.05 | 1906 | 0.05 | 827 | 1.01 | 57927 | 1.19 |
| F91S, V106I, T107M | | | | | | | | | |
| T15I, P18S, V33M, N35F, | 1692 | 7550 | 0.17 | 1015 | 0.03 | 789 | 0.97 | 2709 | 0.06 |
| T39S, M55L, R78S, L79P, | | | | | | | | | |
| F91S, T107M | | | | | | | | | |
| P18S, Q62K, K70E, L79P, | 1693 | 11173 | 0.26 | 691 | 0.02 | 735 | 0.90 | 1951 | 0.04 |
| F91S, G92E, R113W | | | | | | | | | |
| P18F, F20I, T26M, A47V, | 1694 | 136088 | 3.11 | 54026 | 1.42 | 1401 | 1.72 | 96629 | 1.99 |
| E51K, L79P, F91S | | | | | | | | | |
| P18T, D23A, Q60H, L79P, | 1695 | 43795 | 1.00 | 98241 | 2.58 | 888 | 1.09 | 70891 | 1.46 |
| M90V, F91S, T107M | | | | | | | | | |
| P18S, D23G, C29R, N35D, | 1696 | 1599 | 0.04 | 1030 | 0.03 | 1115 | 1.37 | 1944 | 0.04 |
| E37G, M55I, Q62K, S65A, | | | | | | | | | |
| S67G, R78G, L79P, F91S, | | | | | | | | | |
| L104M, T107M, Q110R | | | | | | | | | |
| A13E, P18S, M36R, Q62K, | 1697 | Little to no protein produced | | | | | | | |
| S67T, L79P, N85D, F91S, | | | | | | | | | |
| T107M | | | | | | | | | |
| V9I, P18T, H49R, L79P, | 1698 | 46375 | 1.06 | 76851 | 2.02 | 794 | 0.97 | 80210 | 1.65 |
| N85D, F91S, L104T, | | | | | | | | | |
| T107M | | | | | | | | | |
| V9A, P18F, T61S, Q62L, | 1699 | 26109 | 0.60 | 891 | 0.02 | 825 | 1.01 | 2633 | 0.05 |
| L79P, F91S, G111R | | | | | | | | | |
| D8E, P18T, T61A, L79P, | 1700 | Little to no protein produced | | | | | | | |
| F91S, T107M | | | | | | | | | |
| P18S, V41A, H49R, S54C, | 1701 | 1098 | 0.03 | 830 | 0.02 | 876 | 1.07 | 1678 | 0.03 |
| L79S, N85Y, L88P, F91S, | | | | | | | | | |
| L104M, T107M | | | | | | | | | |
| V11E, P18H, F20Y, V25E, | 1702 | 979 | 0.02 | 846 | 0.02 | 844 | 1.03 | 928 | 0.02 |
| N35S, H49R, L79P, F91S, | | | | | | | | | |
| T107M, G111R | | | | | | | | | |
| V11A, P18F, D23A, L79P, | 1703 | 45249 | 1.04 | 913 | 0.02 | 830 | 1.02 | 33883 | 0.70 |
| G80D, V95A, T107M | | | | | | | | | |
| P18S, K70R, L79P, F91S, | 1704 | 16180 | 0.37 | 793 | 0.02 | 854 | 1.05 | 1182 | 0.02 |
| G111R | | | | | | | | | |
| P18T, D23A, Q60H, L79P, | 1695 | 175673 | 4.02 | 161958 | 4.26 | 879 | 1.08 | 50981 | 1.05 |
| M90V, F91S, T107M | | | | | | | | | |
| V9L, V11M, P18S, N35S, | 1705 | 2999 | 0.07 | 2315 | 0.06 | 893 | 1.09 | 925 | 0.02 |
| S54G, Q62K, L79P, | | | | | | | | | |
| L104M, T107M, V115M | | | | | | | | | |
| V9L, P18Y, V25A, V38G, | 1706 | 138011 | 3.16 | 26015 | 0.68 | 919 | 1.13 | 17970 | 0.37 |
| M55V, A77T, L79P, M90I, | | | | | | | | | |
| F91S, L104M | | | | | | | | | |
| V10G, P18T, L72Q, L79P, | 1707 | 4253 | 0.10 | 1584 | 0.04 | 863 | 1.06 | 3643 | 0.07 |
| F91S, T107M | | | | | | | | | |
| P18S, H59R, A76G, R78S, | 1708 | 130622 | 2.99 | 79435 | 2.09 | 1009 | 1.24 | 44493 | 0.91 |
| L79P | | | | | | | | | |
| V9A, P18S, M36T, S65G, | 1709 | 92503 | 2.12 | 989 | 0.03 | 886 | 1.09 | 7850 | 0.16 |
| L79P, F91S, L104T, | | | | | | | | | |
| G111R, S112I | | | | | | | | | |
| P18T, S52A, V57A, Q60R, | 1710 | 187338 | 4.29 | 10579 | 0.28 | 908 | 1.11 | 3791 | 0.08 |
| Q62K, S65C, L79P, F91T, | | | | | | | | | |
| N100Y, T107M | | | | | | | | | |
| V11A, P18F, N35D, A47E, | 1711 | Little to no protein produced | | | | | | | |
| Q62K, L79P, F91S, G99D, | | | | | | | | | |
| T107M, S114N | | | | | | | | | |
| V11A, P18T, N35S, L79P, | 1712 | 218660 | 5.00 | 273825 | 7.20 | 1269 | 1.56 | 69871 | 1.44 |
| S87T, F91S | | | | | | | | | |
| V9D, V11M, Q12L, P18S, | 1713 | 8693 | 0.20 | 790 | 0.02 | 852 | 1.04 | 1991 | 0.04 |
| E37V, M55I, Q60R, K70Q, | | | | | | | | | |
| L79P, F91S, L104M, | | | | | | | | | |
| T107M | | | | | | | | | |
| T15S, P18S, Y30H, Q32L, | 1714 | 16213 | 0.37 | 2092 | 0.06 | 1056 | 1.29 | 6994 | 0.14 |
| Q62R, L79P, F91S, T107M | | | | | | | | | |
| CD155-ECD-Fc | 47 | 43704 | 1.00 | 38032 | 1.00 | 816 | 1.00 | 48638 | 1.00 |
| | (ECD) | | | | | | | | |
| CD112-IgV | 761 | 1289 | | 824 | | 17819 | | 1172 | 0.02 |

TABLE 15A
Variant CD112 selected against cognate binding partners. Molecule sequences, binding data,
and costimulatory bioactivity data.

| | | | | | | Anti-CD3 |
|---|---|---|---|---|---|---|
| | | TIGIT | CD112R | CD226 | Mock | IFN-gamma |
| | | tfxn MFI | tfxn MFI | MFI | Expi293 | (pg/mL) |
| | | (TIGIT | (CD112R | (CD226 | MFI | (Anti-CD3 |
| | SEQ ID | MFI | MFI | MFI | (Mock MFI | IFN-gamma |
| | NO | parental | parental | parental | parental | parental |
| CD112 mutation(s) | (IgV) | ratio) | ratio) | ratio) | ratio) | ratio) |
| WT CD112 | 761 | 210829 | 1452 | 265392 | 1112 | 676.6 |
| | | (1.00) | (1.00) | (1.00) | (1.00) | (1.00) |
| Y33H, A112V, G117D | 762 | 12948 | 1552 | 1368 | 1241 | 164.8 |
| | | (0.06) | (1.07) | (0.01) | (1.12) | (0.24) |
| V19A, Y33H, S64G, S80G, | 763 | 48356 | 1709 | 2831 | 1098 | |
| G98S, N106Y, A112V | | (0.23) | (1.18) | (0.01) | (0.99) | |
| L32P, A112V | 764 | 191432 | 1557 | 11095 | 1259 | 390.4 |
| | | (0.91) | (1.07) | (0.04) | (1.13) | (0.58) |
| A95V, A112I | 765 | 238418 | 1706 | 51944 | 1215 | 282.5 |
| | | (1.13) | (1.17) | (0.20) | (1.09) | (0.42) |
| P28S, A112V | 766 | 251116 | 1985 | 153382 | 1189 | 503.4 |
| | | (1.19) | (1.37) | (0.58) | (1.07) | (0.74) |
| P27A, T38N, V101A, | 767 | 255803 | 2138 | 222822 | 1399 | 240.7 |
| A112V | | (1.21) | (1.47) | (0.84) | (1.26) | (0.36) |
| S118F | 768 | 11356 | 5857 | 6938 | 1270 | 271.7 |
| | | (0.05) | (4.03) | (0.03) | (1.14) | (0.40) |
| R12W, H48Y, F54S, S118F | 769 | 10940 | 3474 | 5161 | 1069 | |
| | | (0.05) | (2.39) | (0.02) | (0.96) | |
| R12W, Q79R, S118F | 770 | 2339 | 7370 | 1880 | 1338 | 447.4 |
| | | (0.01) | (5.08) | (0.01) | (1.20) | (0.66) |
| T113S, S118Y | 771 | 6212 | 6823 | 1554 | 1214 | 225.1 |
| | | (0.03) | (4.70) | (0.01) | (1.09) | (0.33) |
| S118Y | 772 | 2921 | 6535 | 2003 | 1463 | 190.4 |
| | | (0.01) | (4.50) | (0.01) | (1.32) | (0.28) |
| N106I, S118Y | 773 | 2750 | 7729 | 1815 | 1222 | 265.8 |
| | | (0.01) | (5.32) | (0.01) | (1.10) | (0.39) |
| N106I, S118F | 774 | 1841 | 9944 | 1529 | 1308 | 437.9 |
| | | (0.01) | (6.85) | (0.01) | (1.18) | (0.65) |
| A95T, L96P, S118Y | 775 | 2352 | 4493 | 1412 | 1329 | 292.4 |
| | | (0.01) | (3.09) | (0.01) | (1.19) | (0.43) |
| Y33H, P67S, N106Y, | 776 | 225015 | 3259 | 204434 | 1296 | 618.8 |
| A112V | | (1.07) | (2.24) | (0.77) | (1.17) | (0.91) |
| N106Y, A112V | 777 | 6036 | 1974 | 15334 | 1108 | 409.9 |
| | | (0.03) | (1.36) | (0.06) | (1.00) | (0.61) |
| T18S, Y33H, A112V | 778 | 252647 | 1347 | 183181 | 1412 | 601.8 |
| | | (1.20) | (0.93) | (0.69) | (1.27) | (0.89) |
| P9S, Y33H, N47S, A112V | 779 | 240467 | 1418 | 203608 | 1361 | 449.1 |
| | | (1.14) | (0.98) | (0.77) | (1.22) | (0.66) |
| P42S, P67H, A112V | 780 | 204484 | 1610 | 188647 | 1174 | 530.6 |
| | | (0.97) | (1.11) | (0.71) | (1.06) | (0.78) |
| P27L, L32P, P42S, A112V | 781 | 219883 | 1963 | 84319 | 1900 | 251.6 |
| | | (1.04) | (1.35) | (0.32) | (1.71) | (0.37) |
| G98D, A112V | 782 | 4879 | 2369 | 6100 | 1729 | 387.0 |
| | | (0.02) | (1.63) | (0.02) | (1.55) | (0.57) |
| Y33H, S35P, N106Y, | 783 | 250724 | 1715 | 94373 | 1495 | 516.2 |
| A112V | | (1.19) | (1.18) | (0.36) | (1.34) | (0.76) |
| L32P, P42S, T100A, | 784 | 242675 | 1742 | 202567 | 1748 | 435.3 |
| A112V | | (1.15) | (1.20) | (0.76) | (1.57) | (0.64) |
| P27S, P45S, N106I, A112V | 785 | 223557 | 1799 | 84836 | 1574 | 277.5 |
| | | (1.06) | (1.24) | (0.32) | (1.42) | (0.41) |
| Y33H, N47K, A112V | 786 | 251339 | 1525 | 199601 | 1325 | 483.2 |
| | | (1.19) | (1.05) | (0.75) | (1.19) | (0.71) |
| Y33H, N106Y, A112V | 787 | 297169 | 1782 | 258315 | 1440 | 485.4 |
| | | (1.41) | (1.23) | (0.97) | (1.30) | (0.72) |
| K78R, D84G, A112V, | 788 | 236662 | 1638 | 24850 | 1345 | 142.5 |
| F114S | | (1.12) | (1.13) | (0.09) | (1.21) | (0.21) |
| Y33H, N47K, F54L, A112V | 789 | 14483 | 1617 | 2371 | 1353 | 352.8 |
| | | (0.07) | (1.11) | (0.01) | (1.22) | (0.52) |
| Y33H, A112V | 790 | 98954 | 1216 | 1726 | 1298 | |
| | | (0.47) | (0.84) | (0.01) | (1.17) | |
| A95V, A112V | 791 | 168521 | 2021 | 200789 | 1459 | 412.9 |
| | | (0.80) | (1.39) | (0.76) | (1.31) | (0.61) |
| R12W, A112V | 792 | 135635 | 1582 | 23378 | 1412 | 165.8 |
| | | (0.64) | (1.09) | (0.09) | (1.27) | (0.24) |
| A112V | 798 | 213576 | 1986 | 151900 | 1409 | 211.4 |
| | | (1.01) | (1.37) | (0.57) | (1.27) | (0.31) |
| Y33H, A112V | 790 | 250667 | 1628 | 230578 | 1216 | 612.7 |
| | | (1.19) | (1.12) | (0.87) | (1.09) | (0.91) |
| R12W, P27S, A112V | 793 | 3653 | 1308 | 9105 | 1051 | |
| | | (0.02) | (0.90) | (0.03) | (0.94) | |
| Y33H, V51M, A112V | 794 | 218698 | 1384 | 195450 | 1170 | 709.4 |
| | | (1.04) | (0.95) | (0.74) | (1.05) | (1.05) |
| Y33H, A112V, S118T | 795 | 219384 | 1566 | 192645 | 1313 | 396.3 |
| | | (1.04) | (1.08) | (0.73) | (1.18) | (0.59) |
| Y33H, V101A, A112V, | 796 | 5605 | 1582 | 5079 | 1197 | |
| P115S | | (0.03) | (1.09) | (0.02) | (1.08) | |
| H24R, T38N, D43G, | 797 | 227095 | 1537 | 229311 | 1336 | 858.6 |
| A112V | | (1.08) | (1.06) | (0.86) | (1.20) | (1.27) |
| A112V | 798 | 4056 | 1356 | 10365 | 986 | |
| | | (0.02) | (0.93) | (0.04) | (0.89) | |
| P27A, A112V | 799 | 193537 | 1531 | 230708 | 3084 | 355.1 |
| | | (0.92) | (1.05) | (0.87) | (2.77) | (0.52) |
| A112V, S118T | 800 | 233173 | 1659 | 121817 | 845 | 533.3 |
| | | (1.11) | (1.14) | (0.46) | (0.76) | (0.79) |
| R12W, A112V, M122I | 801 | 235935 | 1463 | 217748 | 1350 | 528.0 |
| | | (1.12) | (1.01) | (0.82) | (1.21) | (0.78) |
| Q83K, N106Y, A112V | 802 | 205948 | 2042 | 234958 | 1551 | 481.4 |
| | | (0.98) | (1.41) | (0.89) | (1.39) | (0.71) |
| R12W, P27S, A112V, | 803 | 11985 | 2667 | 12756 | 1257 | 334.4 |
| S118T | | (0.06) | (1.84) | (0.05) | (1.13) | (0.49) |
| P28S, Y33H, A112V | 804 | 4711 | 1412 | 3968 | 955 | |
| | | (0.02) | (0.97) | (0.01) | (0.86) | |
| P27S, Q90R, A112V | 805 | 3295 | 1338 | 6755 | 1048 | |
| | | (0.02) | (0.92) | (0.03) | (0.94) | |
| L15V, P27A, A112V, | 806 | 209888 | 1489 | 84224 | 1251 | 512.3 |
| S118T | | (1.00) | (1.03) | (0.32) | (1.13) | 0.76) |

| | | |
|---|---|---|
| Y33H, N106Y, T108I, | 807 | Not tested |
| A112V | | |
| Y33H, P56L, V75M, | 808 | Not tested |
| V101M, A112V | | |

TABLE 15B
Additional CD112 Variants and Binding Data.

| | | TIGIT | | CD226 | | CD112R | | CD96 | |
|---|---|---|---|---|---|---|---|---|---|
| | | | Fold | | Fold | | Fold | | Fold |
| | SEQ | | Increase | | Increase | | Increase | | Increase |
| CD112 | ID NO | MFI | to WT | MFI at | to WT | MFI at | to WT | MFI at | to WT |
| Mutation(s) | (IgV) | 100 nM | IgV | 100 nM | IgV | 100 nM | IgV | 100 nM | IgV |
| S118F | 768 | 1763 | 0.02 | 1645 | 0.08 | 2974 | 0.61 | 1659 | 0.19 |
| N47K, Q79R, | 891 | 1738 | 0.02 | 1689 | 0.09 | 2637 | 0.54 | 1647 | 0.19 |
| S118F | | | | | | | | | |
| Q40R, P60T, | 892 | 4980 | 0.06 | 1608 | 0.08 | 2399 | 0.50 | 2724 | 0.32 |
| A112V, S118T | | | | | | | | | |
| F114Y, S118F | 893 | 110506 | 1.34 | 7325 | 0.37 | 1502 | 0.31 | 1553 | 0.18 |
| N106I, S118Y | 773 | 1981 | 0.02 | 1700 | 0.09 | 2394 | 0.49 | 1582 | 0.19 |
| S118Y | 772 | 101296 | 1.23 | 9990 | 0.50 | 1429 | 0.30 | 1551 | 0.18 |
| Y33H, K78R, | 894 | 2276 | 0.03 | 2115 | 0.11 | 3429 | 0.71 | 2082 | 0.24 |
| S118Y | | | | | | | | | |
| N106I, S118F | 774 | 1875 | 0.02 | 1675 | 0.08 | 2365 | 0.49 | 1662 | 0.19 |
| R12W, A46T, | 895 | 3357 | 0.04 | 1808 | 0.09 | 1664 | 0.34 | 4057 | 0.48 |
| K66M, Q79R, | | | | | | | | | |
| N106I, T113A, | | | | | | | | | |
| S118F | | | | | | | | | |
| Y33H, A112V, | 896 | 3376 | 0.04 | 2886 | 0.15 | 3574 | 0.74 | 3685 | 0.43 |
| S118F | | | | | | | | | |
| R12W, Y33H, | 897 | 100624 | 1.22 | 24513 | 1.24 | 1490 | 0.31 | 2060 | 0.24 |
| N106I, S118F | | | | | | | | | |
| L15V, Q90R, | 898 | 5791 | 0.07 | 4169 | 0.21 | 2752 | 0.57 | 4458 | 0.52 |
| S118F | | | | | | | | | |
| N47K, D84G, | 899 | 3334 | 0.04 | 2819 | 0.14 | 2528 | 0.52 | 3498 | 0.41 |
| N106I, S118Y | | | | | | | | | |
| L32P, S118F | 900 | 3881 | 0.05 | 2506 | 0.13 | 2659 | 0.55 | 2518 | 0.29 |
| Y33H, Q79R, | 901 | Low to no protein produced | | | | | | | |
| A112V, S118Y | | | | | | | | | |
| T18A, N106I, | 902 | 84035 | 1.02 | 10208 | 0.52 | 1585 | 0.33 | 1590 | 0.19 |
| S118T | | | | | | | | | |
| L15V, Y33H, | 903 | Low to no protein produced | | | | | | | |
| N106Y, A112V, | | | | | | | | | |
| S118F | | | | | | | | | |
| V37M, S118F | 904 | 96986 | 1.18 | 2523 | 0.13 | 1985 | 0.41 | 1849 | 0.22 |
| N47K, A112V, | 905 | 1980 | 0.02 | 1859 | 0.09 | 2733 | 0.56 | 1825 | 0.21 |
| S118Y | | | | | | | | | |
| A46T, A112V | 906 | 4224 | 0.05 | 4685 | 0.24 | 3288 | 0.68 | 4273 | 0.50 |
| P28S, Y33H, | 907 | 6094 | 0.07 | 2181 | 0.11 | 1891 | 0.39 | 3021 | 0.35 |
| N106I, S118Y | | | | | | | | | |
| P30S, Y33H, | 908 | 2247 | 0.03 | 2044 | 0.10 | 1796 | 0.37 | 2658 | 0.31 |
| N47K, V75M, | | | | | | | | | |
| Q79R, N106I, | | | | | | | | | |
| S118Y | | | | | | | | | |
| V19A, N47K, | 909 | 2504 | 0.03 | 2395 | 0.12 | 2174 | 0.45 | 2852 | 0.33 |
| N106Y, K116E, | | | | | | | | | |
| S118Y | | | | | | | | | |
| Q79R, T85A, | 910 | 2192 | 0.03 | 1741 | 0.09 | 2367 | 0.49 | 1620 | 0.19 |
| A112V, S118Y | | | | | | | | | |
| Y33H, A112V | 790 | 20646 | 0.25 | 1465 | 0.07 | 1794 | 0.37 | 2589 | 0.30 |
| V101M, N106I, | 911 | 55274 | 0.67 | 6625 | 0.33 | 1357 | 0.28 | 1494 | 0.17 |
| S118Y | | | | | | | | | |
| Y33H, Q79R, | 912 | 6095 | 0.07 | 1760 | 0.09 | 2393 | 0.49 | 3033 | 0.36 |
| N106I, A112V, | | | | | | | | | |
| S118T | | | | | | | | | |
| Q79R, A112V | 913 | 1571 | 0.02 | 1490 | 0.08 | 2284 | 0.47 | 1326 | 0.16 |
| Y33H, A46T, | 914 | 90813 | 1.10 | 15626 | 0.79 | 1298 | 0.27 | 3571 | 0.42 |
| Q79R, N106I, | | | | | | | | | |
| S118F | | | | | | | | | |
| A112V, G121S | 915 | 95674 | 1.16 | 19992 | 1.01 | 1252 | 0.26 | 4005 | 0.47 |
| Y33H, Q79R, | 916 | 36246 | 0.44 | 2118 | 0.11 | 1970 | 0.41 | 3250 | 0.38 |
| N106I, S118Y | | | | | | | | | |
| Y33H, N106I, | 917 | 47352 | 0.57 | 4217 | 0.21 | 2641 | 0.55 | 1488 | 0.17 |
| A112V | | | | | | | | | |
| Y33H, A46T, | 918 | 14413 | 0.17 | 1596 | 0.08 | 2335 | 0.48 | 1441 | 0.17 |
| V101M, | | | | | | | | | |
| A112V, S118T | | | | | | | | | |
| L32P, L99M, | 919 | 3056 | 0.04 | 1791 | 0.09 | 2210 | 0.46 | 2000 | 0.23 |
| N106I, S118F | | | | | | | | | |
| L32P, T108A, | 920 | 104685 | 1.27 | 4531 | 0.23 | 2308 | 0.48 | 1518 | 0.18 |
| S118F | | | | | | | | | |
| A112V | 798 | 4937 | 0.06 | 1903 | 0.10 | 1646 | 0.34 | 3011 | 0.35 |
| R12W, Q79R, | 921 | 55539 | 0.67 | 6918 | 0.35 | 1386 | 0.29 | 1740 | 0.20 |
| A112V | | | | | | | | | |
| Y33H, N106Y, | 922 | 2786 | 0.03 | 2517 | 0.13 | 1787 | 0.37 | 2023 | 0.24 |
| E110G, A112V | | | | | | | | | |
| Y33H, N106I, | 923 | 1967 | 0.02 | 1579 | 0.08 | 2601 | 0.54 | 1517 | 0.18 |
| S118Y | | | | | | | | | |
| Q79R, S118F | 924 | 82055 | 1.00 | 7582 | 0.38 | 1298 | 0.27 | 1970 | 0.23 |
| Y33H, Q79R, | 925 | 21940 | 0.27 | 1632 | 0.08 | 1141 | 0.24 | 18423 | 2.16 |
| G98D, V101M, | | | | | | | | | |
| A112V | | | | | | | | | |
| N47K, T81S, | 926 | 6889 | 0.08 | 1311 | 0.07 | 1303 | 0.27 | 1145 | 0.13 |
| V101M, | | | | | | | | | |
| A112V, S118F | | | | | | | | | |
| G82S, S118Y | 927 | 4267 | 0.05 | 1938 | 0.10 | 2140 | 0.44 | 2812 | 0.33 |
| Y33H, A112V, | 928 | 14450 | 0.18 | 1532 | 0.08 | 2353 | 0.49 | 3004 | 0.35 |
| S118Y | | | | | | | | | |
| Y33H, N47K, | 929 | 70440 | 0.85 | 3557 | 0.18 | 1447 | 0.30 | 1679 | 0.20 |
| Q79R, N106Y, | | | | | | | | | |
| A112V | | | | | | | | | |
| Y33H, S118T | 930 | 113896 | 1.38 | 17724 | 0.89 | 1252 | 0.26 | 5001 | 0.59 |
| R12W, Y33H, | 931 | 3376 | 0.04 | 2727 | 0.14 | 2047 | 0.42 | 2339 | 0.27 |
| Q79R, V101M, | | | | | | | | | |
| A112V | | | | | | | | | |
| S118F | 768 | 2685 | 0.03 | 1864 | 0.09 | 2520 | 0.52 | 1566 | 0.18 |
| Wildtype | 761 | 82414 | 1.00 | 19803 | 1.00 | 4842 | 1.00 | 8541 | 1.00 |
| CD112-IgV Fc | (IgV) | | | | | | | | |
| CD112 ECD-Fc | 48 | 29157 | 0.35 | 8755 | 0.44 | 1107 | 0.23 | 1103 | 0.13 |
| | (ECD) | | | | | | | | |
| Anti-hFc PE | — | 1383 | 0.02 | 1461 | 0.07 | 1358 | 0.28 | 1468 | 0.17 |

TABLE 15C
Additional CD112 Variants and Binding Data.

| | | TIGIT | | CD226 | | CD112R | | CD96 | |
|---|---|---|---|---|---|---|---|---|---|
| | | | Fold | | Fold | | Fold | | Fold |
| | SEQ | | Increase | | Increase | | Increase | | Increase |
| CD112 | ID NO | MFI | to WT | MFI at | to WT | MFI at | to WT | MFI at | to WT |
| Mutation(s) | (IgV) | 20 nM | IgV | 20 nM | IgV | 20 nM | IgV | 20 nM | IgV |
| N106I, S118Y | 773 | 1288 | 0.04 | 1334 | 0.12 | 6920 | 4.16 | 1102 | 0.44 |
| Y33H, Q83K, | 1481 | 115690 | 3.31 | 10046 | 0.93 | 1128 | 0.68 | 2053 | 0.82 |
| A112V, S118T | | | | | | | | | |
| R12W, Q79R, | 779 | 1436 | 0.04 | 1296 | 0.12 | 6546 | 3.93 | 1046 | 0.42 |
| S118F | | | | | | | | | |
| V29M, Y33H, | 1482 | Not tested | | | | | | | |
| N106I, S118F | | | | | | | | | |
| Y33H, A46T, | 1483 | 111256 | 3.18 | 14974 | 1.39 | 1148 | 0.69 | 3333 | 1.34 |
| A112V | | | | | | | | | |
| Y33H, Q79R, | 1484 | 1483 | 0.04 | 1326 | 0.12 | 7425 | 4.46 | 1138 | 0.46 |
| S118F | | | | | | | | | |
| Y33H, N47K, | 1485 | 1338 | 0.04 | 1159 | 0.11 | 1516 | 0.91 | 1140 | 0.46 |
| F74L, S118F | | | | | | | | | |
| R12W, V101M, | 1486 | 1378 | 0.04 | 1249 | 0.12 | 5980 | 3.59 | 1182 | 0.47 |
| N106I, S118Y | | | | | | | | | |
| A46T, V101A, | 1487 | 1359 | 0.04 | 1199 | 0.11 | 6729 | 4.04 | 1173 | 0.47 |
| N106I, S118Y | | | | | | | | | |
| Y33H, N106Y, | 787 | 113580 | 3.25 | 17771 | 1.65 | 1207 | 0.72 | 2476 | 0.99 |
| A112V | | | | | | | | | |
| N106Y, A112V, | 1488 | Not tested | | | | | | | |
| S118T | | | | | | | | | |
| S76P, T81I, | 1489 | Not tested | | | | | | | |
| V101M, | | | | | | | | | |
| N106Y, A112V, | | | | | | | | | |
| S118F | | | | | | | | | |
| N106Y, A112V | 777 | 29015 | 0.83 | 2760 | 0.26 | 1159 | 0.70 | 1639 | 0.66 |
| P9R, L21V, | 1490 | 1920 | 0.05 | 1218 | 0.11 | 1107 | 0.66 | 1074 | 0.43 |
| P22L, I34M, | | | | | | | | | |
| S69F, F74L, | | | | | | | | | |
| A87V, A112V, | | | | | | | | | |
| L125A | | | | | | | | | |
| Y33H, V101M, | 1491 | 126266 | 3.61 | 24408 | 2.27 | 1150 | 0.69 | 4535 | 1.82 |
| A112V | | | | | | | | | |
| N106I, S118F | 774 | 1776 | 0.05 | 1385 | 0.13 | 9058 | 5.44 | 1370 | 0.55 |
| V29A, L32P, | 1492 | 1265 | 0.04 | 1148 | 0.11 | 5057 | 3.04 | 1194 | 0.48 |
| S118F | | | | | | | | | |
| A112V | 798 | 69673 | 1.99 | 6387 | 0.59 | 1140 | 0.68 | 1214 | 0.49 |
| Y33H, V101M, | 1491 | 133815 | 3.83 | 24992 | 2.32 | 1184 | 0.71 | 6338 | 2.54 |
| A112V | | | | | | | | | |
| P28S, Y33H, | 907 | 2745 | 0.08 | 1689 | 0.16 | 6625 | 3.98 | 1978 | 0.79 |
| N106I, S118Y | | | | | | | | | |
| Y33H, V101M, | 1493 | 118654 | 3.40 | 21828 | 2.03 | 1253 | 0.75 | 3871 | 1.55 |
| N106I, A112V | | | | | | | | | |
| R12W, Y33H, | 1494 | 171390 | 4.91 | 5077 | 0.47 | 1124 | 0.68 | 2636 | 1.06 |
| N47K, Q79R, | | | | | | | | | |
| S118Y | | | | | | | | | |
| A112V, S118T | 800 | 103203 | 2.95 | 15076 | 1.40 | 1155 | 0.69 | 1426 | 0.57 |
| Y33H, A46T, | 1495 | 141859 | 4.06 | 29436 | 2.74 | 1184 | 0.71 | 5760 | 2.31 |
| A112V, S118T | | | | | | | | | |
| Y33H, A112V, | 1496 | 5161 | 0.15 | 1734 | 0.16 | 1184 | 0.71 | 1249 | 0.50 |
| F114L, S118T | | | | | | | | | |
| A112V | 798 | 78902 | 2.26 | 6224 | 0.58 | 1114 | 0.67 | 1181 | 0.47 |
| Y33H, T38A, | 1497 | 111293 | 3.19 | 25702 | 2.39 | 1192 | 0.72 | 99015 | 39.69 |
| A46T, V101M, | | | | | | | | | |
| A112V | | | | | | | | | |
| Q79R, A112V | 913 | 96674 | 2.77 | 7264 | 0.67 | 1130 | 0.68 | 1216 | 0.49 |
| Y33H, N106I, | 923 | 5720 | 0.16 | 1453 | 0.14 | 6543 | 3.93 | 1248 | 0.50 |
| S118Y | | | | | | | | | |
| P28S, Y33H, | 1498 | 22393 | 0.64 | 1378 | 0.13 | 1550 | 0.93 | 19174 | 7.68 |
| S69P, N106I, | | | | | | | | | |
| A112V, S118Y | | | | | | | | | |
| Y33H, P42L, | 1499 | 214116 | 6.13 | 13878 | 1.29 | 1315 | 0.79 | 4753 | 1.91 |
| N47K, V101M, | | | | | | | | | |
| A112V | | | | | | | | | |
| Y33H, N47K, | 1500 | 6719 | 0.19 | 1319 | 0.12 | 1305 | 0.78 | 1278 | 0.51 |
| F74S, Q83K, | | | | | | | | | |
| N106I, F111L, | | | | | | | | | |
| A112V, S118T | | | | | | | | | |
| Y33H, A112V, | 1501 | 184794 | 5.29 | 10204 | 0.95 | 1269 | 0.76 | 4321 | 1.73 |
| S118T, V119A | | | | | | | | | |
| Y33H, N106I, | 1502 | 6872 | 0.20 | 1591 | 0.15 | 2308 | 1.39 | 2796 | 1.12 |
| A112V, S118F | | | | | | | | | |
| Y33H, K66M, | 1503 | 1724 | 0.05 | 1259 | 0.12 | 6782 | 4.07 | 1197 | 0.48 |
| S118F, W124L | | | | | | | | | |
| S118F | 768 | 1325 | 0.04 | 1213 | 0.11 | 7029 | 4.22 | 1135 | 0.46 |
| N106I, A112V | 1504 | 111342 | 3.19 | 4241 | 0.39 | 1546 | 0.93 | 1178 | 0.47 |
| Y33H, A112V | 790 | 177926 | 5.09 | 13761 | 1.28 | 1152 | 0.69 | 3117 | 1.25 |
| WT CD112 IgV | 1367 | 34932 | 1.00 | 10762 | 1.00 | 1665 | 1.00 | 2495 | 1.00 |
| WT CD112-Fc | 48 | 28277 | 0.81 | 8023 | 0.75 | 1253 | 0.75 | 1064 | 0.43 |
| ECD | (ECD) | | | | | | | | |
| Anti-huFc PE | — | 1138 | 0.03 | 1006 | 0.09 | 1010 | 0.61 | 1062 | 0.43 |

TABLE 16A
Variant PD-L2 selected against PD-1. Molecule sequence and binding data.

| | | Binding to Jurkat/PD-1 | | Fortebio |
|---|---|---|---|---|
| | | Cells | | binding to |
| | SEQ | MFI | Fold increase | PD-1-Fc |
| | ID NO | at | over wildtype | Response |
| PD-L2 mutation(s) | (IgV) | 50 nM | PD-L2 IgV-Fc | Units |
| H15Q | 1357 | 15998 | 1.63 | 0.007 |
| N24D | 1358 | 1414 | 0.14 | −0.039 |
| E44D | 1359 | 2928 | 0.3 | −0.006 |
| V89D | 1360 | 3361 | 0.34 | 0.005 |
| Q82R, V89D | 1361 | 44977 | 4.57 | 1.111 |
| E59G, Q82R | 1362 | 12667 | 1.29 | −0.028 |
| S39I, V89D | 1363 | 26130 | 2.65 | 0.26 |
| S67L, V89D | 1364 | 15991 | 1.62 | 0.608 |
| S67L, I85F | 1365 | 529 | 0.05 | −0.005 |
| S67L, I86T | 1366 | 6833 | 0.69 | 0.141 |
| H15Q, K65R | 1367 | 13497 | 1.37 | −0.001 |
| H15Q, Q72H, V89D | 1368 | 12629 | 1.28 | 0.718 |
| H15Q, S67L, R76G | 1369 | 47201 | 4.8 | 0.418 |
| H15Q, R76G, I85F | 1370 | 2941 | 0.3 | −0.038 |
| H15Q, T47A, Q82R | 1371 | 65174 | 6.62 | 0.194 |
| H15Q, Q82R, V89D | 1372 | 49652 | 5.04 | 1.198 |
| H15Q, C23S, I86T | 1373 | 830 | 0.08 | −0.026 |
| H15Q, S39I, I86T | 1374 | 1027 | 0.1 | 0.309 |
| H15Q, R76G, I85F | 1375 | 1894 | 0.19 | −0.006 |
| E44D, V89D, W91R | 1376 | 614 | 0.06 | −0.048 |
| I13V, S67L, V89D | 1377 | 26200 | 2.66 | 1.42 |
| H15Q, S67L, I86T | 1378 | 15952 | 1.62 | 0.988 |
| I13V, H15Q, S67L, I86T | 1379 | 21570 | 2.19 | 1.391 |
| I13V, H15Q, E44D, V89D | 1380 | 23958 | 2.43 | 1.399 |
| I13V, S39I, E44D, Q82R, V89D | 1381 | 71423 | 7.26 | 0.697 |
| I13V, E44D, Q82R, V89D | 1382 | 45191 | 4.59 | 1.283 |
| I13V, Q72H, R76G, I86T | 1383 | 10429 | 1.06 | 0.733 |
| I13V, H15Q, R76G, I85F | 1384 | 4736 | 0.48 | −0.04 |
| H15Q, S67L, R76G, I85F | 1386 | 2869 | 0.29 | 0.025 |
| H15Q, S39I, R76G, V89D | 1386 | Little or no protein produced | | |
| H15Q, T47A, Q72H, R76G, I86T | 1387 | 32103 | 3.26 | 0.512 |
| H15Q, T47A, Q72H, R76G | 1388 | 16500 | 1.68 | 0.327 |
| I13V, H15Q, T47A, Q72H, R76G | 1389 | 73412 | 7.46 | 0.896 |
| H15Q, E44D, R76G, I85F | 1390 | 2885 | 0.29 | −0.013 |
| H15Q, S39I, S67L, V89D | 1391 | 45502 | 4.62 | 1.174 |
| H15Q, N32D, S67L, V89D | 1392 | 25880 | 2.63 | 1.407 |
| N32D, S67L, V89D | 1393 | 31753 | 3.23 | 1.155 |
| H15Q, S67L, Q72H, R76G, V89D | 1394 | 40180 | 4.08 | 1.464 |
| H15Q, Q72H, Q74R, R76G, I86T | 1395 | 4049 | 0.41 | 0.093 |
| G28V, Q72H, R76G, I86T | 1396 | 5563 | 0.57 | 0.003 |
| I13V, H15Q, S39I, E44D, S67L | 1397 | 63508 | 6.45 | 0.889 |
| E44D, S67L, Q72H, Q82R, V89D | 1398 | 51467 | 5.23 | 1.061 |
| H15Q, V89D | 1399 | 17672 | 1.8 | 0.31 |
| H15Q, T47A | 1400 | 26578 | 2.7 | 0.016 |
| I13V, H15Q, Q82R | 1401 | 76146 | 7.74 | 0.655 |
| I13V, H15Q, V89D | 1402 | 28745 | 2.92 | 1.331 |
| I13V, S67L, Q82R, V89D | 1403 | 58992 | 5.99 | 1.391 |
| I13V, H15Q, Q82R, V89D | 1404 | 49523 | 5.03 | 1.419 |
| H15Q, V31M, S67L, Q82R, V89D | 1405 | 67401 | 6.85 | 1.37 |
| I13V, H15Q, T47A, Q82R | 1406 | 89126 | 9.05 | 0.652 |
| I13V, H15Q, V31A, N45S, Q82R, V89D | 1407 | 68016 | 6.91 | 1.327 |
| H15Q, T47A, H69L, Q82R, V89D | 1409 | 65598 | 6.66 | 1.44 |
| I13V, H15Q, T47A, H69L, R76G, V89D | 1410 | 54340 | 5.52 | 1.719 |
| I12V, I13V, H15Q, T47A, Q82R, V89D | 1411 | 61207 | 6.22 | 1.453 |
| I13V, H15Q, R76G, D77N, Q82R, V89D | 1412 | 33079 | 3.36 | 0.065 |
| I13V, H15Q, T47A, R76G, V89D | 1413 | 53668 | 5.45 | 1.596 |
| I13V, H15Q, T47A, Q82R, V89D | 1414 | 63320 | 6.43 | 1.418 |
| I13V, H15Q, T47A, Q82R, V89D | 1414 | 60980 | 6.2 | 1.448 |
| I13V, H15Q, I36V, T47A, S67L, V89D | 1416 | 52835 | 5.37 | 1.627 |
| H15Q, T47A, K65R, S67L, Q82R, V89D | 1417 | 79692 | 8.1 | 1.453 |
| H15Q, L33P, T47A, S67L, P71S, V89D | 1418 | 45726 | 4.65 | 1.467 |
| I13V, H15Q, Q72H, R76G, I86T | 1419 | 24450 | 2.48 | 1.355 |
| H15Q, T47A, S67L, Q82R, V89D | 1420 | 67962 | 6.9 | 1.479 |
| F2L, H15Q, D46E, T47A, Q72H, R76G, Q82R, V89D | 1421 | 23039 | 2.34 | 1.045 |
| I13V, H15Q, L33F, T47A, Q82R, V89D | 1422 | 62254 | 6.32 | 1.379 |
| H15Q, N24S, T47A, Q72H, R76G, V89D | 1424 | 32077 | 3.26 | 0.4 |
| I13V, H15Q, E44V, T47A, Q82R, V89D | 1425 | 61005 | 6.2 | 1.329 |
| H15Q, N18D, T47A, Q72H, V73A, R76G, I86T, V89D | 1426 | 48317 | 4.91 | 0.475 |
| I13V, H15Q, T37A, E44D, S48C, S67L, Q82R, V89D | 1427 | 47605 | 4.84 | 1.255 |
| H15Q, L33H, S67L, R76G, Q82R, V89D | 1428 | 62326 | 6.33 | 1.507 |
| I13V, H15Q, T47A, Q72H, R76G, I86T | 1429 | 49016 | 4.98 | 1.477 |
| H15Q, S39I, E44D, Q72H, V75G, R76G, Q82R, V89D | 1430 | 43713 | 4.44 | 0.646 |
| H15Q, T47A, S67L, R76G, Q82R, V89D | 1431 | 71897 | 7.3 | 1.539 |
| I13V, H15Q, T47A, S67L, Q72H, R76G, Q82R, V89D | 1432 | 71755 | 7.29 | 1.536 |
| Wild Type PD-L2 IgV | 1263 | 9843 | 1 | −0.024 |
| Full length ECD of PD-L2 | 31 | 2145 | 0.22 | 0.071 |
| Full length ECD of PD-L1 (R&D Systems) | 30 | 23769 | 2.41 | 1.263 |
| Anti-PD-1 monoclonal antibody (nivolumab) | — | 87002 | 8.84 | 0.899 |

TABLE 16B
Bioactivity Data of PD-L2 variants selected against PD-1 in MLR.

| | | | Fold |
|---|---|---|---|
| | | | increase |
| | SEQ | IFN | over |
| | ID | gamma | wildtype |
| | NO | levels | PD-L2 |
| PD-L2 mutation(s) | (IgV) | pg/mL | IgV-Fc |
| H15Q | 1357 | 1817.1 | 1.32 |
| N24D | 1358 | 1976.3 | 1.44 |
| E44D | 1359 | 1499.4 | 1.09 |
| V89D | 1360 | 1168.1 | 0.85 |
| Q82R, V89D | 1361 | 1617 | 1.17 |
| E59G, Q82R | 1362 | 1511.3 | 1.1 |
| S39I, V89D | 1363 | 1314.5 | 0.95 |
| S67L, V89D | 1364 | 1230.1 | 0.89 |
| S67L, I85F | 1365 | 1281.9 | 0.93 |
| S67L, I86T | 1366 | 1020.4 | 0.74 |
| H15Q, K65R | 1367 | 1510.8 | 1.1 |
| H15Q, Q72H, V89D | 1368 | 1272.2 | 0.92 |
| H15Q, S67L, R76G | 1369 | 1426.2 | 1.04 |
| H15Q, R76G, I85F | 1370 | 1725.7 | 1.25 |
| H15Q, T47A, Q82R | 1371 | 1317.9 | 0.96 |
| H15Q, Q82R, V89D | 1372 | 1081.2 | 0.79 |
| H15Q, C23S, I86T | 1373 | 1847.2 | 1.34 |
| H15Q, S39I, I86T | 1374 | 1415.2 | 1.03 |
| H15Q, R76G, I85F | 1375 | 1437.8 | 1.04 |
| E44D, V89D, W91R | 1376 | 1560.1 | 1.13 |
| I13V, S67L, V89D | 1377 | 867.5 | 0.63 |
| H15Q, S67L, I86T | 1378 | 1034.2 | 0.75 |
| I13V, H15Q, S67L, I86T | 1379 | 1014.4 | 0.74 |
| I13V, H15Q, E44D, V89D | 1380 | 1384.2 | 1.01 |
| I13V, S39I, E44D, Q82R, V89D | 1381 | 935.6 | 0.68 |
| I13V, E44D, Q82R, V89D | 1382 | 1009.5 | 0.73 |
| I13V, Q72H, R76G, I86T | 1383 | 1953 | 1.42 |
| I13V, H15Q, R76G, I85F | 1384 | 1528.5 | 1.11 |
| H15Q, S67L, R76G, I85F | 1386 | 1318.7 | 0.96 |
| H15Q, T47A, Q72H, R76G, I86T | 1387 | 1599.6 | 1.16 |
| H15Q, T47A, Q72H, R76G | 1388 | 1462.5 | 1.06 |
| I13V, H15Q, T47A, Q72H, R76G | 1389 | 1469.8 | 1.07 |
| H15Q, E44D, R76G, I85F | 1390 | 1391.6 | 1.01 |
| H15Q, S39I, S67L, V89D | 1391 | 1227 | 0.89 |
| H15Q, N32D, S67L, V89D | 1392 | 1285.7 | 0.93 |
| N32D, S67L, V89D | 1393 | 1194 | 0.87 |
| H15Q, S67L, Q72H, R76G, V89D | 1394 | 1061.2 | 0.77 |
| H15Q, Q72H, Q74R, R76G, I86T | 1395 | 933.8 | 0.68 |
| G28V, Q72H, R76G, I86T | 1396 | 1781.6 | 1.29 |
| I13V, H15Q, S39I, E44D, S67L | 1397 | 1256.9 | 0.91 |
| E44D, S67L, Q72H, Q82R, V89D | 1398 | 1281.4 | 0.93 |
| H15Q, V89D | 1399 | 1495.4 | 1.09 |
| H15Q, T47A | 1400 | 1637.2 | 1.19 |
| I13V, H15Q, Q82R | 1401 | 1432.9 | 1.04 |
| I13V, H15Q, V89D | 1402 | 1123 | 0.82 |
| I13V, S67L, Q82R, V89D | 1403 | 1372.8 | 1 |
| I13V, H15Q, Q82R, V89D | 1404 | 1596.6 | 1.16 |
| H15Q, V31M, S67L, Q82R, V89D | 1405 | 1206.5 | 0.88 |
| I13V, H15Q, T47A, Q82R | 1406 | 1703.3 | 1.24 |
| I13V, H15Q, V31A, N45S, Q82R, V89D | 1407 | 1723.1 | 1.25 |
| H15Q, T47A, H69L, Q82R, V89D | 1409 | 1732.5 | 1.26 |
| I13V, H15Q, T47A, H69L, R76G, V89D | 1410 | 1075.5 | 0.78 |
| I12V, I13V, H15Q, T47A, Q82R, V89D | 1411 | 1533.2 | 1.11 |
| I13V, H15Q, R76G, D77N, Q82R, V89D | 1412 | 1187.9 | 0.86 |
| I13V, H15Q, T47A, R76G, V89D | 1413 | 1253.7 | 0.91 |
| I13V, H15Q, T47A, Q82R, V89D | 1414 | 1445.5 | 1.05 |
| I13V, H15Q, T47A, Q82R, V89D | 1414 | 1737 | 1.26 |
| I13V, H15Q, I36V, T47A, S67L, V89D | 1416 | 1357.4 | 0.99 |
| H15Q, T47A, K65R, S67L, Q82R, V89D | 1417 | 1335.3 | 0.97 |
| H15Q, L33P, T47A, S67L, P71S, V89D | 1418 | 1289.1 | 0.94 |
| I13V, H15Q, Q72H, R76G, I86T | 1419 | 1221 | 0.89 |
| H15Q, T47A, S67L, Q82R, V89D | 1420 | 1197.1 | 0.87 |
| F2L, H15Q, D46E, T47A, Q72H, R76G, | 1421 | 1170.7 | 0.85 |
| Q82R, V89D | | | |
| I13V, H15Q, L33F, T47A, Q82R, V89D | 1422 | 1468.4 | 1.07 |
| I13V, H15Q, T47A, E58G, S67L, Q82R, | 1423 | 836.1 | 0.61 |
| V89D | | | |
| H15Q, N24S, T47A, Q72H, R76G, V89D | 1424 | 1091.8 | 0.79 |
| I13V, H15Q, E44V, T47A, Q82R, V89D | 1425 | 1270.5 | 0.92 |
| H15Q, N18D, T47A, Q72H, V73A, R76G, | 1426 | 1065.8 | 0.77 |
| I86T, V89D | | | |
| I13V, H15Q, T37A, E44D, S48C, S67L, | 1427 | 1751.7 | 1.27 |
| Q82R, V89D | | | |
| H15Q, L33H, S67L, R76G, Q82R, V89D | 1428 | 1502 | 1.09 |
| I13V, H15Q, T47A, Q72H, R76G, I86T | 1429 | 1088.1 | 0.79 |
| H15Q, S39I, E44D, Q72H, V75G, R76G, | 1430 | 940.9 | 0.68 |
| Q82R, V89D | | | |
| H15Q, T47A, S67L, R76G, Q82R, V89D | 1431 | 1097.8 | 0.8 |
| I13V, H15Q, T47A, S67L, Q72H, R76G, | 1432 | 1559.6 | 1.13 |
| Q82R, V89D | | | |
| Wild Type PD-L2 IgV | 1263 | 1376.8 | 1 |
| Full length ECD of PD-L2 | 31 | 1173.2 | 0.85 |
| Full length ECD of PD-L1 | 30 | 2190.9 | 1.59 |
| Nivolumab (anti-PD-1) | — | 418.9 | 0.3 |

### Example 9

### Assessment of Bioactivity of Affinity-Matured IgSF Domain-Containing Molecules using Mixed Lymphocyte Reaction (MLR)

[0703] This Example describes Fc-fusion variant protein bioactivity characterization in human primary T cell in vitro assays.

[0704] Soluble variant PD-L1 IgV-Fc bioactivity was tested in a human Mixed Lymphocyte Reaction (MLR). Human primary dendritic cells (DC) were generated by culturing monocytes isolated from PBMC (BenTech Bio, USA) in vitro for 7 days with 50 ng/mL rIL-4 (R&D Systems, USA) and 80 ng/mL rGM-CSF (R&D Systems, USA) in Ex-Vivo 15 media (Lonza, Switzerland). To fully induce DC maturation, lipopolysaccharide (LPS) (InvivoGen Corp., USA) was added to the DC cultures on day 6 and cells were incubated for an additional 24 hours. Approximately, 10,000 matured DC and 100,000 purified allogeneic CD3+ T cells (BenTech Bio, USA) were co-cultured with several concentrations of variant PD-L1 IgV-Fc fusion proteins in 96 well round-bottom plates in 200 μl final volume of Ex-Vivo 15 media. Irrelevant human IgG or media only (designated “No Add”) were used as negative controls. As positive controls, PDL1-Fc (full PD-L1 extracellular domain), wildtype PD-L1 IgV-Fc and or positive control anti-PD-1 monoclonal antibody (nivolumab) was assessed. Variant PD-L1 IgV-Fc fusion proteins were tested at various concentrations as indicated in FIGS. 8 and 9. On day 5, IFN-gamma secretion in culture supernatants was analyzed using the Human IFN-gamma Duoset ELISA kit (R&D Systems, USA). Optical density was measured on a BioTek Cytation Multimode Microplate Reader (BioTek Corp., USA) and quantitated against titrated rIFN-gamma standard included in the IFN-gamma Duo-set kit (R&D Systems, USA).

[0705] Results for the bioactivity studies for exemplary tested variant PD-L1 IgV-Fc are shown in FIG. 8 and FIG. 9, which sets forth the calculated levels of IFN-gamma in culture supernatants (pg/mL) at the indicated concentration of variant IgV-Fc fusion molecule. The variants are identified with reference to the amino acid substitutions in the IgV of PD-L1 with reference to positions corresponding to positions of the unmodified (wildtype) PD-L1 ECD sequence set forth in SEQ ID NO:30 or 1728. As shown in FIG. 8, exemplary variant PD-L1 IgV-Fc molecules exhibited improved activities to increase IFNg production in an MLR assay. As shown in FIG. 9, the exemplary variant PD-L1 IgV-Fc fusion molecules tested show comparable activity to nivolumab in an MLR assay.

### Example 10

### Generation of Stacked Molecules Containing Different Affinity-Modified Domains

[0706] This Example describes immunomodulatory proteins that were generated as multi-domain stack constructs containing at least two different affinity modified IgV domains from identified variant PD-L1 polypeptides, identified variant CD112 polypeptides and identified variant CD155 polypeptides described above. Specifically, the exemplary variant PD-L1 IgV D43G/N45D/L56Q/V58A/G101G-ins (G101GG) (SEQ ID NO: 303), CD112 IgV molecule S118F (SEQ ID NO: 768) and/or the exemplary variant CD155 IgV molecule P18S/S65W/S67A/L104Q/G111R (SEQ ID NO: 1576) were linked together and fused to an Fc in various configurations.

[0707] Homodimeric stacks were generated in various configurations as summarized in FIGS. 5A and 5B and as follows. In the generated homodimeric stack constructs, the variant CD155 IgV variant, CD112 IgV and/or variant PD-L1 IgV were variously linked to the N- or C-terminus of a human IgG1 Fc region via a 2×GGGS (SEQ ID NO: 240) or 3× GGGGS (SEQ ID NO: 239) peptide linker. In this study, the exemplary IgG1 Fc region is set forth in SEQ ID NO:1155 and contained the mutations L234A, L235E, G237A, E356D and M358L by EU numbering (corresponding to L19A, L20E, G22A, E141D and M143L with reference to wild-type human IgG1 Fc set forth in SEQ ID NO:187). Further, the Fc region contained replacement of the cysteine residues to a serine residue at position 5 (C5S) compared to the wild-type or unmodified Fc set forth in SEQ ID NO: 187 (corresponding to C220S by EU numbering). In some examples, the Fc was further modified to remove the C-terminal lysine at position 232 of the wild-type or unmodified Fc set forth in SEQ ID NO: 197 (corresponding to K447del by EU numbering). The exemplary IgG1 Fc region comprising a lysine deletion is set forth in SEQ ID NO: 1715. Other Fc regions also are suitable for generation of stack molecules. Exemplary generated stacks are set forth below.

[0708] Expression constructs encoding Fc fusion proteins of interest were transiently expressed in Expi293 HEK293 cells from Invitrogen using the manufacturer's commercial Expifectamine reagents and media. Supernatants were harvested and protein was captured and eluted from a Protein A column using an AKTA protein purification system. The eluted material was then separated by an additional preparative SEC step to generate monomeric, highly purified material. The purified proteins were formulated in 15 mM acetate, 200 mM NaCl, 9% sucrose, pH 5.0 (ASU5). The protein was vialed in a sterile biosafety cabinet and frozen at −80 C. A vial was thawed and assessed by analytical SEC to demonstrate the material was stable and predominantly monomeric after thaw.

[0709] For each stack, the encoding nucleic acid molecule was designed to produce homodimeric stacks in various configurations with sequences in the order shown:

[0710] A. Stack Constructs Containing PD-L1 and CD155

[0711] The encoding nucleic acid molecule were designed to generate homodimeric stacks in various configurations of sequences in the order shown:
[0712] PD-L1/CD155 Stack 1 (SEQ ID NO: 1716): CD155 variant (SEQ ID NO: 1576)—2×GGGS (SEQ ID NO: 240)—Fc (SEQ ID NO: 1155)—3× GGGGS (SEQ ID NO: 239)—PD-L1 (SEQ ID NO: 303)
[0713] PD-L1/CD155 Stack 2 (SEQ ID NO: 1717): PD-L1 (SEQ ID NO: 303)—2×GGGS (SEQ ID NO: 240)—Fc (SEQ ID NO: 1155)—3× GGGGS (SEQ ID NO: 239)—CD155 variant (SEQ ID NO: 1576)
[0714] PD-L1/CD155 Stack 3 (SEQ ID NO: 1718): CD155 variant (SEQ ID NO: 1576)—3×GGGGS (SEQ ID NO: 239)—PD-L1 (SEQ ID NO: 303)—2×GGGS (SEQ ID NO: 240)—Fc (SEQ ID NO: 1155)
[0715] PD-L1/CD155 Stack 4 (SEQ ID NO: 1719): PD-L1 (SEQ ID NO: 303)—3× GGGGS (SEQ ID NO: 239)—CD155 variant (SEQ ID NO: 1576)—2×GGGS (SEQ ID NO: 240)—Fc (SEQ ID NO: 1155)
[0716] PD-L1/CD155 Stack 5 (SEQ ID NO: 1720): N-terminal HMSSVSAQ set forth in SEQ ID NO: 1156—Fc (SEQ ID NO: 1155)—3× GGGGS (SEQ ID NO: 239)—CD155 variant (SEQ ID NO: 1576)—3×GGGS (SEQ ID NO: 239)—PD-L1 (SEQ ID NO: 303)
[0717] PD-L1/CD155 Stack 6 (SEQ ID NO: 1721): N-terminal HMSSVSAQ set forth in SEQ ID NO: 1156—Fc (SEQ ID NO: 1155)—3× GGGGS (SEQ ID NO: 239)—PD-L1 (SEQ ID NO: 303)—3×GGGS (SEQ ID NO: 239)—CD155 variant (SEQ ID NO: 1576)

[0718] B. Stack Constructs Containing PD-L1, CD112 and CD155

[0719] The encoding nucleic acid molecule were designed to generate homodimeric stacks in various configurations of sequences in the order shown:
[0720] PD-L1/CD112/CD155 Stack 1 (SEQ ID NO: 1722): PD-L1 (SEQ ID NO: 303)—3×GGGS (SEQ ID NO: 239)—CD155 variant (SEQ ID NO: 1576)—2×GGGS (SEQ ID NO: 240)—Fc with lysine removed (SEQ ID NO: 1715)—3× GGGGS (SEQ ID NO: 239)—CD112 (SEQ ID NO: 768)
[0721] PD-L1/CD112/CD155 Stack 2 (SEQ ID NO: 1723): PD-L1 (SEQ ID NO: 303)—3×GGGS (SEQ ID NO: 239)—CD155 variant (SEQ ID NO: 1576)—3×GGGS (SEQ ID NO: 239)—CD112 (SEQ ID NO: 768)—2×GGGS (SEQ ID NO: 240)—Fc (SEQ ID NO: 1155)
[0722] PD-L1/CD112/CD155 Stack 3 (SEQ ID NO: 1724): PD-L1 (SEQ ID NO: 303)—3×GGGS (SEQ ID NO: 239)—CD112 (SEQ ID NO: 768)—3×GGGS (SEQ ID NO: 239)—CD155 variant (SEQ ID NO: 1576)—2×GGGS (SEQ ID NO: 240)—Fc (SEQ ID NO: 1155)

### Example 11

### Assessment of Binding and Bioactivity of PD-L1/CD155 Stacked Affinity-Matured IgSF Domain-Containing Molecules

[0723] This Example describes binding studies to assess specificity and affinity of exemplary PD-L1/CD155 variant IgV stack immunomodulatory proteins (PD-L1/CD155 stacked IgV-Fc), generated in Example 10, for binding to cognate binding partners. In addition, a Jurkat/IL2/PD1/TIGIT reporter assay was used to assess PD-1 and TIGIT blocking activity of PD-L1/CD155 stacked IgV-Fc molecules. As a control, binding and blocking activity also was assessed of the non-stack variant PD-L1 IgV-Fc or CD155 IgV-Fc fusion molecules containing the same variant PD-L1 IgV (SEQ ID NO:303) or variant CD155 IgV (SEQ ID NO:1576), respectively, used in the stacks. Wild-type CD155-ECD-Fc and wild-type PD-L1-ECD-Fc containing the wildtype CD155 ECD (SEQ ID NO:20) or the wildtype PD-L1 ECD (SEQ ID NO:3), respectively, also were assessed.

[0724] A. Binding to Cell-Expressed Counter Structure

[0725] Binding studies were carried out using Jurkat/IL-2 reporter cells (purchased from Promega Corp. USA) that were transduced to stably express human PD-1 (Jurkat/PD-1 cells), human TIGIT (Jurkat/TIGIT cells) or both PD-1 and TIGIT (Jurkat/PD-1/TIGIT cells). For staining by flow cytometry, 100,000 Jurkat/PD-1, Jurkat/TIGIT, Jurkat/PD-1/TIGIT cells or negative control (Jurkat only) were plated in 96-well round-bottom plates. Cells were spun down and resuspended in staining buffer (PBS (phosphate buffered saline), 1% BSA (bovine serum albumin), and 0.1% sodium azide) for 20 minutes to block non-specific binding. Afterwards, cells were centrifuged again and resuspended in 50 μL staining buffer containing 100 nM to 6 pM of each candidate Fc fusion protein, either variant PD-L1 IgV-Fc or CD155 IgV-Fc fusion molecules or PD-L1/CD155 stacked IgV-Fc fusion molecules described above. Primary staining was performed on ice for 90 minutes, before washing cells twice in 200 μL staining buffer. PE-conjugated anti-human Fc (Jackson ImmunoResearch, USA) was diluted 1:150 in 50 μL staining buffer and added to cells and incubated another 30 minutes on ice. Secondary antibody was washed out twice, cells were fixed in 4% formaldehyde/PBS, and samples were analyzed on Intellicyt flow cytometer (Intellicyt Corp., USA).

[0726] Mean Fluorescence Intensity (MFI) was calculated with FlowJo Version 10 software (FlowJo LLC, USA). Table 17 sets forth the binding activity as measured by the Mean Fluorescence Intensity (MFI) value for binding of 20 nM of each stack Fc-fusion molecule, non-stack variant PD-L1 IgV-Fc or CD155 IgV-Fc controls or wild-type ECD controls, to Jurkat/PD-1, Jurkat/TIGIT, and Jurkat/PD-1/TIGIT cells. As shown in Table 17, several stack proteins bound both PD-1 and TIGIT with high affinity. Studies were carried out substantially as described above to further assess binding of the stack proteins at various doses.

TABLE 17
Binding of Stacks to Cell-Expressed Counter Structure

| | | Flow Binding to Jurkat | | |
|---|---|---|---|---|
| | | Cells Stably Expressing: | | |
| SEQ ID | | | | PD-1 + |
| NO | Description | PD-1 | TIGIT | TIGIT |
| 1716 | (CD155 IgV) (G4S)2 Fc (G4S)3 | 61805 | 80658 | 35128 |
| | (PD-L1 IgV) | | | |
| 1717 | (PD-L1 IgV) (G4S)2 Fc(G4S)3 | 69813 | 36485 | 52538 |
| | (CD155 IgV) | | | |
| 1718 | (CD155 IgV) (G4S)3 (PD-LI | 47261 | 81840 | 32188 |
| | IgV) (G4S)2 Fc | | | |
| 1719 | (PD-L1 IgV) (G4S)3 (CD155 | 77959 | 60515 | 51615 |
| | IgV) (G4S)2 Fc | | | |
| 303 | non-stack variant PD-L1 IgV-Fc | 111746 | 630 | 41390 |
| | control | | | |
| 1576 | non-stack variant CD155 IgV-Fc | 460 | 79152 | 7910 |
| | control | | | |
| 20 (ECD) | CD155-ECD-Fc | 511 | 28790 | 1196 |
| 3 (ECD) | PD-L1-ECD-Fc (R&D Systems) | 35005 | 557 | 10358 |
| 1155 | Fc Control (homodimer) | 437 | 483 | 478 |
| | | MFI at | MFI at | MFI at |
| | | 20 nM | 20 nM | 20 nM |

[0727] B. Assessment of Bioactivity of Affinity-Matured IgSF Domain-Containing Molecules

[0728] Jurkat effector cells expressing an IL-2-luciferase reporter and cell-surface PD-1 and TIGIT were suspended at 2×10⁶ cells/mL in Jurkat Assay buffer (RPMI1640+5% FBS) and anti-CD28 was added to a final concentration of 3 μg/mL. Jurkat cells were then plated at 50 μL/well for a total of 100,000 cells per well.

[0729] To each well, 25 μL of PD-L1/CD155 stacked IgV-Fc test protein was added to the Jurkat cells. As a control, non-stack variant PD-L1 IgV-Fc or CD155 IgV-Fc fusion molecules, alone or in combination, also were assessed for comparison. Anti-TIGIT antibody (clone MBSA43), anti-PD-1 antibody (nivolumab) or an empty Fc molecule were also used as controls. All proteins were added at five concentrations: 400 nM, 100 nM, 25 nM, 6.25 nM, and 1.56 nM. The Jurkat cells with test or control proteins were incubated for 15 minutes at room temperature. CHO-derived artificial antigen presenting cells (aAPC) displaying transduced cell surface anti-CD3 single chain Fv (OKT3), PD-L1 and CD155 were brought to 0.8×10⁶ cells/mL and 25 μL of cells was added to each well bringing the final volume of each well to 100 μL. Each well had a final ratio of 5:1 Jurkat:CHO cells and a test protein concentration of 100, 25, 6.25, 1.56 or 0.47 nM and an anti-CD28 concentration of 1.5 μg/mL. Jurkat cells and CHO cells were incubated for 5 hours at 37 degrees Celsius in a humidified 5% CO₂ incubation chamber. Plates are then removed from the incubator and acclimated to room temperature for 15 minutes. 100 μL of a cell lysis and luciferase substrate solution (BioGlo luciferase reagent, Promega) was added to each well and the plates were incubated on an orbital shaker for 10 minutes. Luminescence was measured with a 1 second per well integration time using a BioTek Cytation luminometer.

[0730] An average relative luminescence value was determined for each test sample and a fold increase (or decrease) in IL-2 reporter signal was calculated for each stack molecule compared to non-stack variant PD-L1 IgV-Fc and variant CD155 IgV-Fc proteins. Because the assay is a measure of blockade of inhibitory signals, an increase in luminescent signal compared to control indicates the presence of blocking activity.

[0731] As shown in Table 18, the luciferase activity of the Jurkat effector cells co-cultured with anti-CD3/PD-L1/CD155 aAPC and 100 nM PD-L1/CD155 stack Fc molecules was altered (increased) for each molecule tested compared to control. The differences in luminescence signals demonstrate the differences in binding of the PD-L1/CD155 stack-Fc molecules to PD-1 and TIGIT and the resulting co-blockade of inhibitory activity. In the Table, Column 1 sets forth the SEQ ID NO identifier for each PD-L1/CD155 stack-Fc variant tested. Studies were carried out substantially as described above to further assess binding of the stack proteins at various doses.

TABLE 18
Jurkat/IL2/PD1/TIGIT + CHO/OKT3/PD-L1/CD155 Reporter Assay Results

| | | | Fold Increase | Fold Increase | Fold Increase |
|---|---|---|---|---|---|
| | | | Compared to | Compared to | Compared to |
| | | | non-stack | non-stack | variant PD-L1 |
| | | | variant PD- | variant | IgV-Fc and |
| SEQ ID | | | L1 IgV-Fc | CD155 IgV- | variant |
| NO | Description | RLU | control | Fc control | CD155 IgV-Fc |
| 1716 | (CD155 IgV) (G4S)2 Fc | 573 | 0.6 | 1.7 | 0.8 |
| | (G4S)3 (PD-L1 IgV) | | | | |
| 1717 | (PD-L1 IgV) (G4S)2 | 962 | 1.0 | 2.8 | 1.4 |
| | Fc(G4S)3 (CD155 IgV) | | | | |
| 1718 | (CD155 IgV) (G4S)3 | 434 | 0.5 | 1.3 | 0.6 |
| | (PD-L1 IgV) (G4S)2 Fc | | | | |
| 1719 | (PD-L1 IgV) (G4S)3 | 1923 | 2.0 | 5.6 | 2.7 |
| | (CD155 IgV) (G4S)2 Fc | | | | |
| 303 | non-stack variant PD- | 958 | 1.0 | 2.8 | 1.3 |
| | L1 IgV-Fc control | | | | |
| 1576 | non-stack variant | 345 | 0.4 | 1.0 | 0.5 |
| | CD155 IgV-Fc control | | | | |
| — | Anti-TIGIT antibody | 2192 | 2.3 | 6.4 | 3.1 |
| | (clone MBSA43), anti- | | | | |
| | PD-1 antibody | | | | |
| | (nivolumab) | | | | |
| 303 + 1576 | PD-L1 IgV + CD155 | 710 | 0.7 | 2.1 | 1.0 |
| | IgV | | | | |
| 1715 | Fc Control | 235 | 0.2 | 0.7 | 0.3 |
| | (homodimer) | | | | |

### Example 12

### Assessment of Binding and Bioactivity of PD-L1/CD112/CD155 Stacked Affinity-Matured IgSF Domain-Containing Molecules

[0732] This Example describes binding studies to assess specificity and affinity of PD-L1/CD112/CD155 stack immunomodulatory proteins (PD-L1/CD112/CD155 stacked IgV-Fc), generated in Example 10, for binding to cognate binding partners. In addition, a Jurkat/IL2/PD1/CD112R/TIGIT reporter assay was used to assess PD-1, CD112R, and TIGIT blocking activity of PD-L1/CD112/CD155 stacked IgV-Fc molecules. As a comparison, binding and blocking activity also was assessed of the non-stack variant PD-L1 IgV-Fc, CD112 IgV-Fc or CD155 IgV-Fc fusion molecules containing the same variant PD-L1 (SEQ ID NO:303), CD112 IgV (SEQ ID NO:768) or variant CD155 IgV (SEQ ID NO:1576), respectively, used in the stacks.

[0733] A. Binding to Cell-Expressed Counter Structure

[0734] Binding studies were carried out using Jurkat/IL-2 reporter cells which endogenously express CD112R (purchased from Promega Corp. USA) that were transduced to stably express human PD-1 (Jurkat/PD-1 cells), human TIGIT (Jurkat/TIGIT cells) or both PD-1 and TIGIT (Jurkat/PD-1/TIGIT cells). For staining by flow cytometry, 100,000 Jurkat parental (CD112R), Jurkat/PD-1, Jurkat/TIGIT, Jurkat/PD-1/TIGITcells were plated in 96-well round-bottom plates. Cells were spun down and resuspended in staining buffer (PBS (phosphate buffered saline), 1% BSA (bovine serum albumin), and 0.1% sodium azide) for 20 minutes to block non-specific binding. Afterwards, cells were centrifuged again and resuspended in 50 μL staining buffer containing 100 nM to 6 pM of each candidate Fc fusion protein. Primary staining was performed on ice for 90 minutes, before washing cells twice in 200 μL staining buffer. PE-conjugated anti-human Fc (Jackson ImmunoResearch, USA) was diluted 1:150 in 50 μL staining buffer and added to cells and incubated another 30 minutes on ice. Secondary antibody was washed out twice, cells were fixed in 4% formaldehyde/PBS, and samples were analyzed on an LSRII flow cytometer (Becton Dickinson Corp., USA).

[0735] Binding values, expressed as Mean Fluorescence Intensity (MFI), were determined for a 33.3 nM concentration of each stack Fc fusion protein and non-stack variant PD-L1 IgV-Fc, CD112-IgV-Fc and CD155-IgV-Fc proteins. Data was analyzed using FlowJo Version 10 software (FlowJo LLC, USA). Results for the binding studies for exemplary tested PD-L1/CD112/CD155 stack Fc fusion molecules (tested at 33.3 nM) are shown in Table 19. As shown, several stack proteins bound PD-1, TIGIT and/or CD112R with high affinity.

TABLE 19
Binding of Stacks to Cell-Expressed Counter Structure

| | | | Binding to Jurkat Transfectants | | | |
|---|---|---|---|---|---|---|
| | | | | | | TIGIT/ |
| | | SEQ ID | | | | CD112R/ |
| Category | Description | NO | TIGIT | CD112R | PD1 | PD1 |
| Stacks | (PD-L1 IgV) (G4S)3 (CD155 IgV) | 1723 | 2457 | 969 | 16989 | 19041 |
| | (G4S)3 (CD112 IgV) (G4S)2 Fc | | | | | |
| | (PD-L1 IgV) (G4S)3 (CD112 IgV) | 1724 | 1504 | 289 | 21968 | 18727 |
| | (G4S)3 (CD155 IgV) (G4S)2 Fc | | | | | |
| Controls | non-stack variant PD-L1 IgV-Fc | 303 | 101 | 100 | 20713 | 18468 |
| | control | | | | | |
| | non-stack variant CD155 IgV-Fc | 1576 | 6294 | 55 | 31 | 961 |
| | control | | | | | |
| | non-stack variant CD112 IgV-Fc | 768 | 358 | 516 | 459 | 477 |
| | control | | | | | |
| | Fc Control | 1155 | 23.3 | 27 | 22 | 35 |

MFI at 33.3 nM

[0736] B. Assessment of Bioactivity of Affinity-Matured IgSF Domain-Containing Molecules

[0737] Jurkat effector cells expressing an IL-2-luciferase reporter and cell-surface PD-1, CD112R, and TIGIT were suspended at 2×10⁶ cells/mL in Jurkat Assay buffer (RPMI1640+5% FBS) and anti-CD28 was added to a final concentration of 3 μg/mL. Jurkat cells were then plated at 50 μL/well for a total of 100,000 cells per well.

[0738] To each well, 25 μL of PD-L1/CD112/CD155 stacked IgV-Fc test protein was added to the Jurkat cells. As a control, non-stack variant PD-L1 IgV-Fc, CD112 IgV-Fc or CD155 IgV-Fc fusion molecules, alone or in combination, also were assessed for comparison. Anti-TIGIT antibody (clone MBSA43), anti-PD-1 antibody (nivolumab) or an empty Fc molecule are used as controls. All proteins were added at five concentrations: 400 nM, 100 nM, 25 nM, 6.25 nM, 1.56 nM, or 0.49 nM. The Jurkat cells with test or control proteins were incubated for 15 minutes at room temperature. CHO-derived artificial antigen presenting cells (aAPC) displaying transduced cell surface anti-CD3 single chain Fv (OKT3), PD-L1 and CD112 were brought to 0.8×10⁶ cells/mL and 25 μL of cells was added to each well bringing the final volume of each well to 100 μL. Each well had a final ratio of 5:1 Jurkat:CHO cells and a test protein concentration of 100, 25, 6.25, 1.56, 0.47 or 0.12 nM and an anti-CD28 concentration of 1.5 μg/mL. Jurkat cells and CHO cells were incubated for 5 hours at 37 degrees Celsius in a humidified 5% CO₂ incubation chamber. Plates are then removed from the incubator and acclimated to room temperature for 15 minutes. 100 μL of a cell lysis and luciferase substrate solution (BioGlo luciferase reagent, Promega) was added to each well and the plates were incubated on an orbital shaker for 10 minutes. Luminescence was measured with a 1 second per well integration time using a BioTek Cytation luminometer.

[0739] An average relative luminescence value (RLU) was determined for each test sample and a fold increase (or decrease) in IL-2 reporter signal was calculated for each stack molecule compared to non-stack variant PD-L1 IgV-Fc, variant CD112 IgV-Fc and variant CD155 IgV-Fc proteins. Because the assay is a measure of blockade of inhibitory signals, an increase in luminescent signal compared to control indicates the presence of blocking activity.

[0740] As shown in Table 20, the luciferase activity of the Jurkat effector cells co-cultured with anti-CD3/PD-L1/CD112 aAPC and the PD-L1/CD112/CD155 stack Fc molecules was altered (increased) for each molecule tested. The differences in luminescence signals demonstrate the differences in binding of the PD-L1/CD112/CD155 stack-Fc molecules to PD-1, CD112R and TIGIT and the resulting co-blockade of inhibitory activity. In the Table, Column 2 sets forth the SEQ ID NO identifier for each PD-L1/CD112/CD155 stack-Fc variant tested.

TABLE 20
Jurkat/IL2/TIGIT/PD1 Reporter Assay

| | | | Fold | Fold | Fold | Fold |
|---|---|---|---|---|---|---|
| | | | Increase | Increase | Increase | Increase |
| | SEQ | | compared | compared | compared | compared |
| | ID | | to Fc | to PD-L1 | to CD155 | to CD112- |
| Description | NO | RLU | Control | IgV-Fc | IgV-Fc | IgV-Fc |
| (PD-L1 IgV) (G4S)3 (CD155 | 1723 | 896 | 1.44 | 1.12 | 1.04 | 1.40 |
| IgV) (G4S)3 (CD112 IgV) | | | | | | |
| (G4S)2 Fc | | | | | | |
| (PD-L1 IgV) (G4S)3 (CD112 | 1724 | 961 | 1.54 | 1.20 | 1.12 | 1.50 |
| IgV) (G4S)3 (CD155 IgV) | | | | | | |
| (G4S)2 Fc | | | | | | |
| non-stack variant PD-L1 IgV- | 303 | 800 | 1.28 | 1.00 | 0.93 | 1.25 |
| Fc control | | | | | | |
| non-stack variant CD155 | 1576 | 859 | 1.38 | 1.07 | 1.00 | 1.34 |
| IgV-Fc control | | | | | | |
| non-stack variant CD112 | 768 | 640 | 1.03 | 0.80 | 0.75 | 1.00 |
| IgV-Fc control | | | | | | |
| Fc Control | 1155 | 624 | 1.00 | 0.78 | 0.73 | 0.98 |

### Example 13

### Assessment of Binding of Affinity-Matured IgSF Domain-Containing Molecules to Cell Expressed Counted Structure

[0741] This Example describes flow cytometry binding studies to assess specificity and affinity of PD-L1-extracellular domain (ECD) variant immunomodulatory proteins for cognate binding partners PD-1 and CD80 using the selection scheme as described in Example 3 for second round selection against rPD-1.Fc or rCD80.Fc, except that mutant constructs were generated based on a wildtype human PD-L1 sequence set forth in SEQ ID NO:1728 containing the full extracellular domain (IgV+IgC) as follows.

(SEQ ID NO: 1728)
FTVTVPKDLYVVEYGSNMTIECKFPVEKQLDLAALTVYWEMEDKNHIQFV
HGEEDLKVQHSSYRQRARLLKDQLSLGNAALQITDVKLQDAGVYRCMISY
GGADYKRITVKVNAPYNKINQRILVVDPVTSEHELTCQAEGYPKAEVIWT
SSDHQVLSGKTTTTNSKREEKLFNVTSTLRINTTTNEIFYCTFRRLDPEE
NHTAELVIPELPLAHPPNERT

[0742] To measure binding to PD-1, studies were carried out using Jurkat/IL-2 reporter cells (purchased from Promega Corp. USA) that were transduced to stably express human PD-1 (Jurkat/PD-1 cells). To measure binding to CD80, studies were carried out using Chinese Hamster Overy (CHO) cells that were transduced to stably express human CD80 (CHO/CD80). 100,000 cells per well of Jurkat/PD-1, CHO/CD80, Jurkat parental or CHO parental cells were plated into 96-well round-bottom plates. Cells were spun down and resuspended in staining buffer (PBS (phosphate buffered saline), 1% BSA (bovine serum albumin), and 0.1% sodium azide) for 20 minutes to block non-specific binding. Afterwards, cells were centrifuged again and resuspended in 50 μL staining buffer containing 100 nM to 3.7 nM of each candidate Fc fusion protein. Primary staining was performed on ice for 90 minutes, before washing cells twice in 200 μL staining buffer. APC-conjugated anti-human Fc (Jackson ImmunoResearch, USA) was diluted 1:150 in 50 μL staining buffer and added to cells and incubated another 30 minutes on ice. Secondary antibody was washed out twice, cells were fixed in 4% formaldehyde/PBS, and samples were analyzed on LSRII flow cytometer (Becton Dickinson Corp., USA).

[0743] Mean Fluorescence Intensity (MFI) was calculated at the 20 nM concentration and compared to wild type PD-L1 ECD-Fc protein with FlowJo Version 10 software (FlowJo LLC, USA). Results for the binding studies for exemplary tested PD-L1-ECD-Fc fusion molecules are shown in Table 21. As demonstrated, the selections resulted in the identification of variant PD-L1 proteins that bind either PD-1 alone, CD80 alone or both proteins with high affinity.

TABLE 21
Flow Binding to Cells Expressing PD-1 or CD80

| | | PD-1 | | CD80 | |
|---|---|---|---|---|---|
| | | | Fold | | Fold |
| | | | Change | | Change |
| | SEQ ID | | Compared | | Compared |
| | NO | MFI at | to WT PD- | MFI at | to WT PD- |
| PD-L1 Mutation(s) | (ECD) | 20 nM | L1 | 20 nM | L1 |
| K57R, S99G | 1729 | 2953 | 0.9 | 16253 | 121.3 |
| K57R, S99G, F189L | 1730 | 1930 | 0.6 | 12906 | 96.3 |
| M18V, M97L, F193S, R195G, | 1731 | 69 | 0.0 | 241 | 1.8 |
| E200K, H202Q | | | | | |
| I36S, M41K, M97L, K144Q, | 1732 | 3498 | 1.1 | 68715 | 512.8 |
| R195G, E200K, H202Q, L206F | | | | | |
| C22R, Q65L, L124S, K144Q, | 1733 | Little or no protein produced | | | |
| R195G, E200N, H202Q, T221L | | | | | |
| M18V, I98L, L124S, P198T, | 1734 | 2187 | 0.7 | 143 | 1.1 |
| L206F | | | | | |
| S99G, N117S, I148V, K171R, | 1735 | Little or no protein produced | | | |
| R180S | | | | | |
| I36T, M97L, A103V, Q155H | 1736 | 120 | 0.0 | 128 | 1.0 |
| K28I, S99G | 1737 | 830 | 0.3 | 693 | 5.2 |
| R195S | 1738 | 3191 | 1.0 | 138 | 1.0 |
| A79T, S99G, T185A, R195G, | 1739 | 1963 | 0.6 | 643 | 4.8 |
| E200K, H202Q, L206F | | | | | |
| K57R, S99G, L124S, K144Q | 1740 | 2081 | 0.7 | 14106 | 105.3 |
| K57R, S99G, R195G | 1741 | 2479 | 0.8 | 10955 | 81.8 |
| D55V, M97L, S99G | 1742 | 11907 | 3.8 | 71242 | 531.7 |
| E27G, I36T, D55N, M97L, K111E | 1743 | 1904 | 0.6 | 88724 | 662.1 |
| E54G, M97L, S99G | 1744 | 8414 | 2.7 | 51905 | 387.4 |
| G15A, I36T, M97L, K111E, | 1745 | 112 | 0.0 | 13530 | 101.0 |
| H202Q | | | | | |
| G15A, I36T, V129D | 1746 | 114 | 0.0 | 136 | 1.0 |
| G15A, I36T, V129D, R195G | 1747 | 125 | 0.0 | 134 | 1.0 |
| G15A, V129D | 1748 | 2075 | 0.7 | 128 | 1.0 |
| I36S, M97L | 1749 | 3459 | 1.1 | 44551 | 332.5 |
| I36T, D55N, M97L, K111E, | 1750 | 265 | 0.1 | 62697 | 467.9 |
| A204T | | | | | |
| I36T, D55N, M97L, K111E, | 1751 | 393 | 0.1 | 72641 | 542.1 |
| V129A, F173L | | | | | |
| I36T, D55S, M97L, K111E, I148V, | 1752 | 94 | 0.0 | 30704 | 229.1 |
| R180S | | | | | |
| I36T, G52R, M97L, V112A, | 1753 | 81 | 0.0 | 149 | 1.1 |
| K144E, V175A, P198T | | | | | |
| I36T, I46V, D55G, M97L, K106E, | 1754 | 69 | 0.0 | 190 | 1.4 |
| K144E, T185A, R195G | | | | | |
| I36T, I83T, M97L, K144E, P198T | 1755 | 62 | 0.0 | 6216 | 46.4 |
| I36T, M97L, K111E | 1756 | Little or no protein produced | | | |
| I36T, M97L, K144E, P198T | 1757 | 197 | 0.1 | 40989 | 305.9 |
| I36T, M97L, Q155H, F193S, | 1758 | 69 | 0.0 | 1251 | 9.3 |
| N201Y | | | | | |
| I36T, M97L, V129D | 1759 | 523 | 0.2 | 50905 | 379.9 |
| L35P, I36S, M97L, K111E | 1760 | 190 | 0.1 | 155 | 1.2 |
| M18I, I36T, E53G, M97L, K144E, | 1761 | 104 | 0.0 | 47358 | 353.4 |
| E199G, V207A | | | | | |
| M18T, I36T, D55N, M97L, K111E | 1762 | 138 | 0.0 | 71440 | 533.1 |
| M18V, M97L, T176N, R195G | 1763 | 1301 | 0.4 | 45300 | 338.1 |
| M97L, S99G | 1764 | 12906 | 4.1 | 81630 | 609.2 |
| N17D, M97L, S99G | 1765 | 10079 | 3.2 | 73249 | 546.6 |
| S99G, T185A, R195G, P198T | 1766 | 2606 | 0.8 | 22062 | 164.6 |
| V129D, H202Q | 1767 | 2001 | 0.6 | 219 | 1.6 |
| V129D, P198T | 1768 | 3245 | 1.0 | 152 | 1.1 |
| V129D, T150A | 1769 | 1941 | 0.6 | 142 | 1.1 |
| V93E, V129D | 1770 | 1221 | 0.4 | 150 | 1.1 |
| Y10F, M18V, S99G, Q138R, | 1771 | 70 | 0.0 | 412 | 3.1 |
| T203A | | | | | |
| WT PD-L1 (IgV + IgC) Fc | 1728 | 3121 | 1.0 | 134 | 1.0 |
| CTLA4-Fc | — | 59 | N/A | 199670 | N/A |
| Anti-PD1 mAb | — | 31482 | N/A | 134 | N/A |
| Fc Control | 1155 | 59 | N/A | 132 | N/A |

[0744] Additional variants identified in the screen as described in Example 3 are set forth in Table 22A.

TABLE 22A
Additional Affinity-Matured IgSF Domain-Containing Molecules

| | SEQ ID |
|---|---|
| | NO |
| PD-L1 Mutation(s) | (ECD) |
| N45D | 1772 |
| K160M, R195G | 1773 |
| N45D, K144E | 1774 |
| N45D, P198S | 1775 |
| N45D, P198T | 1776 |
| N45D, R195G | 1777 |
| N45D, R195S | 1778 |
| N45D, S131F | 1779 |
| N45D, V58D | 1780 |
| V129D, R195S | 1781 |
| 198T, F173Y, L196S | 1782 |
| N45D, E134G, L213P | 1783 |
| N45D, F173I, S177C | 1784 |
| N45D, I148V, R195G | 1785 |
| N45D, K111T, R195G | 1786 |
| N45D, N113Y, R195S | 1787 |
| N45D, N165Y, E170G | 1788 |
| N45D, Q89R, I98V | 1789 |
| N45D, S131F, P198S | 1790 |
| N45D, S75P, P198S | 1791 |
| N45D, V50A, R195T | 1792 |
| E27D, N45D, T183A, I188V | 1793 |
| F173Y, T183I, L196S, T203A | 1794 |
| K23N, N45D, S75P, N120S | 1795 |
| N45D, G102D, R194W, R195G | 1796 |
| N45D, G52V, Q121L, P198S | 1797 |
| N45D, I148V, R195G, N201D | 1798 |
| N45D, K111T, T183A, I188V | 1799 |
| N45D, Q89R, F189S, P198S | 1800 |
| N45D, S99G, C137R, V207A | 1801 |
| N45D, T163I, K167R, R195G | 1802 |
| N45D, T183A, T192S, R194G | 1803 |
| N45D, V50A, I119T, K144E | 1804 |
| T19A, N45D, K144E, R195G | 1805 |
| V11E, N45D, T130A, P198T | 1806 |
| V26A, N45D, T163I, T185A | 1807 |
| K23N, N45D, L124S, K167T, R195G | 1808 |
| K23N, N45D, Q73R, T163I | 1809 |
| K28E, N45D, W149R, S158G, P198T | 1810 |
| K28R, N45D, K57E, I98V, R195S | 1811 |
| K28R, N45D, V129D, T163N, R195T | 1812 |
| M41K, D43G, N45D, R64S, R195G | 1813 |
| M41K, D43G, N45D, R64S, S99G | 1814 |
| N45D, R68L, F173L, D197G, P198S | 1815 |
| N45D, V50A, I148V, R195G, N201D | 1816 |
| M41K, D43G, K44E, N45D, R195G, | 1817 |
| N201D | |
| N45D, V50A, L124S, K144E, L179P, | 1818 |
| R195G | |

[0745] Substantially as described above, flow cytometry binding studies were performed to assess specificity and affinity of PD-L1-extracellular domain (ECD) variant immunomodulatory proteins for cognate binding partner PD-1. To measure binding to PD-1, as described above Jurkat/IL-2 reporter cells transduced to stably express human PD-1 (Jurkat/PD-1 cells) were used. Mean Fluorescence Intensity (MFI) was calculated at the 20 nM concentration and compared to wild type PD-L1 ECD-Fc protein and an Fc only control. Results for the binding studies for exemplary tested PD-L1-ECD-Fc fusion molecules are shown in Table 22B. As demonstrated, the selections resulted in the identification of variant PD-L1 proteins that bind PD-1 alone with high affinity.

TABLE 22B
Flow binding to Jurkat cells expressing PD-1

| | SEQ | | Fold |
|---|---|---|---|
| | ID | MFI at | Increase |
| | NO | 20 nM | over WT PD- |
| PD-L1 Mutation(s) | (ECD) | conc. | L1 ECD-Fc |
| N45D | 1772 | 95635 | 19.1 |
| R195S | 1827 | 5365 | 1.1 |
| K160M, R195G | 1773 | 3931 | 0.8 |
| N45D, K144E | 1774 | 99704 | 19.9 |
| N45D, P198S | 1775 | 117460 | 23.5 |
| N45D, P198T | 1776 | 122118 | 24.4 |
| N45D, R195G | 1777 | 121779 | 24.3 |
| N45D, R195S | 1778 | 128736 | 25.7 |
| N45D, S131F | 1779 | 122458 | 24.5 |
| N45D, V58D | 1780 | 152085 | 30.4 |
| V129D, R195S | 1781 | 7699 | 1.5 |
| I98T, F173Y, L196S | 1782 | 236 | 0.0 |
| N45D, E134G, L213P | 1783 | 2255 | 0.5 |
| N45D, F173I, S177C | 1784 | 2199 | 0.4 |
| N45D, I148V, R195G | 1785 | 109276 | 21.8 |
| N45D, K111T, R195G | 1786 | 65728 | 13.1 |
| N45D, N113Y, R195S | 1787 | 112042 | 22.4 |
| N45D, N165Y, E170G | 1788 | 88971 | 17.8 |
| N45D, Q89R, I98V | 1789 | 90467 | 18.1 |
| N45D, S131F, P198S | 1790 | 116162 | 23.2 |
| N45D, S75P, P198S | 1791 | 129814 | 25.9 |
| N45D, V50A, R195T | 1792 | 141881 | 28.3 |
| E27D, N45D, T183A, I188V | 1793 | 133100 | 26.6 |
| K23N, N45D, S75P, N120S | 1795 | 131995 | 26.4 |
| N45D, G102D, R194W, R195G | 1796 | 13381 | 2.7 |
| N45D, G52V, Q121L, P198S | 1797 | 296 | 0.1 |
| N45D, I148V, R195G, N201D | 1798 | 130537 | 26.1 |
| N45D, K111T, T183A, I188V | 1799 | 108670 | 21.7 |
| N45D, S99G, C137R, V207A | 1801 | 834 | 0.2 |
| N45D, T163I, K167R, R195G | 1802 | 133842 | 26.7 |
| N45D, T183A, T192S, R194G | 1803 | 1349 | 0.3 |
| N45D, V50A, I119T, K144E | 1804 | 34217 | 6.8 |
| V11E, N45D, T130A, P198T | 1806 | 137230 | 27.4 |
| K23N, N45D, Q73R, T163I | 1809 | 139149 | 27.8 |
| K28E, N45D, W149R, S158G, | 1810 | 691 | 0.1 |
| P198T | | | |
| K28R, N45D, V129D, T163N, | 1812 | 137230 | 27.4 |
| R195T | | | |
| M41K, D43G, N45D, R64S, R195G | 1813 | 137230 | 27.4 |
| M41K, D43G, N45D, R64S, S99G | 1814 | 134587 | 26.9 |
| N45D, R68L, F173L, D197G, | 1815 | 59308 | 11.8 |
| P198S | | | |
| N45D, V50A, I148V, R195G, | 1816 | 131264 | 26.2 |
| N201D | | | |
| M41K, D43G, K44E, N45D, R195G, | 1817 | 144667 | 28.9 |
| N201D | | | |
| N45D, V50A, L124S, K144E, | 1818 | 18163 | 3.6 |
| L179P, R195G | | | |
| WT PD-L1 ECD-Fc N10653 | 1728 | 5005 | 1.0 |
| Fc only control | 1155 | 46 | 0.0 |

[0746] Bioactivity of the additional affinity-matured PD-L1 domain-containing molecules was further assessed using Jurkat effector cells expressing an IL-2-luciferase reporter and cell-surface PD-1 substantially as described in Example 12B. As shown in Table 22C, increased luciferase activity of the Jurkat effector cells co-cultured with anti-CD3 and K562/CD80 cells was observed for some Fc fusion molecules with the indicated PD-L1 variant. An average relative luminescence value (RLU) was determined for each test sample and a fold change in IL-2 reporter signal was calculated for each tested molecule compared to wild-type PD-L1 or the Fc only control protein. In the Table, Column 2 sets forth the SEQ ID NO identifier for each PD-L1 variant tested. The differences in luminescence signals demonstrate the differences in binding of the PD-L1 variant Fc molecules to PD-1 and the resulting co-blockade of inhibitory activity.

TABLE 22C
Jurkat/IL2/PD-1 + K562/CD80 + soluble anti-CD3 Reporter Assay

| | | Relative | Fold |
|---|---|---|---|
| | SEQ | Luciferase | Increase |
| | ID | Units (RLU) | over WT |
| | NO | PD-L1 vECD-Fc | PD-L1 |
| PD-L1 Mutation(s) | (ECD) | Conc 50.0 nM | ECD-Fc |
| N45D | 1772 | 460 | 2.3 |
| R195S | 1827 | 215 | 1.1 |
| K160M, R195G | 1773 | 215 | 1.1 |
| N45D, K144E | 1774 | 385 | 1.9 |
| N45D, P198S | 1775 | 457 | 2.3 |
| N45D, P198T | 1776 | 476 | 2.3 |
| N45D, R195G | 1777 | 405 | 2.0 |
| N45D, R195S | 1778 | 417 | 2.1 |
| N45D, S131F | 1779 | 429 | 2.1 |
| N45D, V58D | 1780 | 484 | 2.4 |
| V129D, R195S | 1781 | 223 | 1.1 |
| I98T, F173Y, L196S | 1782 | 209 | 1.0 |
| N45D, E134G, L213P | 1783 | 276 | 1.4 |
| N45D, F173I, S177C | 1784 | 265 | 1.3 |
| N45D, I148V, R195G | 1785 | 496 | 2.4 |
| N45D, K111T, R195G | 1786 | 338 | 1.7 |
| N45D, N113Y, R195S | 1787 | 492 | 2.4 |
| N45D, N165Y, E170G | 1788 | 446 | 2.2 |
| N45D, Q89R, I98V | 1789 | 550 | 2.7 |
| N45D, S131F, P198S | 1790 | 422 | 2.1 |
| N45D, S75P, P198S | 1791 | 549 | 2.7 |
| N45D, V50A, R195T | 1792 | 594 | 2.9 |
| E27D, N45D, T183A, I188V | 1793 | 554 | 2.7 |
| K23N, N45D, S75P, N120S | 1795 | 504 | 2.5 |
| N45D, G102D, R194W, R195G | 1796 | 211 | 1.0 |
| N45D, G52V, Q121L, P198S | 1797 | 225 | 1.1 |
| N45D, I148V, R195G, N201D | 1798 | 401 | 2.0 |
| N45D, K111T, T183A, I188V | 1799 | 354 | 1.7 |
| N45D, S99G, C137R, V207A | 1801 | 226 | 1.1 |
| N45D, T163I, K167R, R195G | 1802 | 440 | 2.2 |
| N45D, T183A, T192S, R194G | 1803 | 250 | 1.2 |
| N45D, V50A, I119T, K144E | 1804 | 292 | 1.4 |
| V11E, N45D, T130A, P198T | 1806 | 470 | 2.3 |
| K23N, N45D, Q73R, T163I | 1809 | 449 | 2.2 |
| K28E, N45D, W149R, S158G, | 1810 | 197 | 1.0 |
| P198T | | | |
| K28R, N45D, V129D, T163N, | 1812 | 437 | 2.2 |
| R195T | | | |
| M41K, D43G, N45D, R64S, | 1813 | 590 | 2.9 |
| R195G | | | |
| M41K, D43G, N45D, R64S, | 1814 | 597 | 2.9 |
| S99G | | | |
| N45D, R68L, F173L, D197G, | 1815 | 327 | 1.6 |
| P198S | | | |
| N45D, V50A, I148V, R195G, | 1816 | 494 | 2.4 |
| N201D | | | |
| M41K, D43G, K44E, N45D, | 1817 | 464 | 2.3 |
| R195G, N201D | | | |
| N45D, V50A, L124S, K144E, | 1818 | 308 | 1.5 |
| L179P, R195G | | | |
| WT PD-L1 ECD-Fc | 1728 | 203 | 1.0 |
| Fc only control | 1155 | 205 | 1.0 |

### Example 14

### Generation of Secreted Immunomodulatory Protein and Assessment of Proliferation of Pan T Cells Transduced with PD-L1 SIP

[0747] To generate a PD-L1 secreted immunomodulatory protein (SIP), DNA encoding exemplary SIPs was obtained as gene blocks from Integrated DNA Technologies (Coralville, USA) and then cloned by Gibson assembly (New England Biolabs Gibson assembly kit) into a modified version of pRRL vector (Dull et al., (1998) J Virol, 72(11): 8463-8471) between restriction sites downstream of MND promoter to remove GFP. Exemplary SIP constructs were generated to encode a protein set forth in SEQ ID NO: 2012-2013, including the signal peptide. In this exemplary Example, the constructs were generated to additionally include a tag moiety. The gene blocks had the following structure in order: 39 base pair overlap with pRRL prior to first restriction site-first restriction site-GCCGCCACC (Kozak); complete ORF encoding PD-L1 IgV wildtype amino acid sequence set forth in SEQ ID NO: 309 or variant PD-L1 IgV set forth in SEQ ID NO: 303 (D43G/N45D/L56Q/V58A/G101G-ins (G101GG), also including in all cases the signal peptide MGSTAILALLLAVLQGVSA as set forth in SEQ ID NO: 2009; DNA encoding Flag-tag as set forth in SEQ ID NO:2010 (DYKDDDDK); DNA encoding His tag as set forth in SEQ ID NO: 2011 (HHHHHH); TAA stop codon; second restriction site—41 base pair overlap with pRRL beyond second restriction site. For comparison, a SIP encoding wild-type PD-L1 also was assessed.

[0748] To prepare lentiviral vectors, 3×10⁶ HEK293 cells were plated per 100 mm dish. On the next day, 4.5 μg of P-Mix (3 μg of PAX2 and 1.5 μg of pMD2G) was added to 6 μg of DNA encoding the SIPs constructs in a 5 mL polypropylene tube. Diluent buffer (10 mM HEPES/150 mM NaCl pH7.05/1 L TC grade H20) was added to the tube to bring up the total volume of 500 μL. To the diluent DNA (PEI:total DNA 4:1), 42 μL of PEI (1 μg/μL) was added and mixed by vortexing. The mixture was incubated at room temperature for 10 minutes and cells were prepared by aspirating medium from the dish gently without disturbing the adherent cells, then replaced with 6 mL of Opti-MEM(1×). DNA/PEI mixture was then added to the dish and incubated at 37° C. for 24 hours. After 24 hours, media was aspirated from the dishes and replaced with 10 mL of fresh DMEM media and then incubated at 37° C. Viral supernatant was collected after 48 hours using a syringe attached to a 0.45 μm filter PES to remove cells and debris from the culture (Thermo Scientific Nalgene Syringe Filter). A separate lentiviral vector stock also was prepared encoding an anti-CD19 CAR (containing an anti-CD19 scFv, a hinge and transmembrane domain derived from CD8 and a CD3zeta signaling domain) substantially as described. The exemplary anti-CD19 CAR used is set forth in SEQ ID NO: 2016 (encoded by the sequence in set forth in SEQ ID NO: 2017) containing the scFv set forth in SEQ ID NO:1163, the CD8-derived hinge and transmembrane domain set forth in SEQ ID NO: 242, and the CD3zeta set forth in SEQ ID NO:243

[0749] T-cells were thawed and activated with anti-CD3/anti-CD28 beads (Dynal) at a 1:1 ratio. The T-cells (1×10⁶ cells) were mixed with 1 mL total lentiviral vector supernatant containing equal volume (0.5 mL each) of the lentiviral vector supernatant encoding the indicated PD-L1 SIP (D43G/N45D/L56Q/V58A/G101GG or wildtype) and a lentiviral vector supernatant encoding the anti-CD19 CAR. As a control, cells were transduced only with the lentiviral vector encoding the anti-CD19 CAR or were transduced with mock vector control. Transduction was performed in the presence of 10 μg/mL polybrene and 50 IU/mL IL-2. Cells were spun down at 2500 rpm for 60 min at 30° C. After 24 hours, 3 mL of Xvivo15 plus media and IL2 was added to each well. The cells were fed every two days with fresh media and cytokines.

[0750] At 14 days after activation, cells were re-stimulated with Nalm6 cells that had been transduced with a lenti-viral vector to provide expression of PD-L1 (Nalm6 PDL1+). Transduced T cells were labeled with Cell Trace Far Red and proliferation was measured at day 3 by determining the fraction of the cells that showed dilution of the dye. Results for the proliferation studies for T cells transduced with exemplary tested variant PD-L1 SIP are shown in FIG. 10.

### Example 15

### Assessment of PD-L1 Multi-Domain Stack Molecules on Activity of Primary Exhausted T Cells

[0751] This Example describes studies to assess specificity and affinity of exemplary PD-L1/CD155 and PD-L1/CD112/CD155 variant IgV stack immunomodulatory proteins (stacked IgV-Fc), generated as described in Example 10, for modulating the activity of exhausted T cells via blocking interactions involving cognate binding partners PD-1, TIGIT and/or CD112R.

[0752] A. Generation of Exhausted T Cells

[0753] To generate exhausted T cells, primary human T cells were stimulated for 7 days with mitomycin C-treated K562 cells that stably expressed anti-CD3 single-chain Fc (OKT3) at a ratio of 10 T cells to 1 K562/OKT3 cell. On day 3, 50 IU/mL of recombinant IL-2 was added to the culture media to promote T cell expansion and survival. On day 7, T cells were harvested, counted and then set up for two additional cycles of restimulation with K562/OKT3 plus IL-2. At the end of 21 days (3 rounds of stimulation), T cells were counted, characterized for expression of inhibitory receptors PD-L1, TIGIT and Lag-3 and then frozen for subsequent assays. Exhausted T cells were detected based on elevated expression of the inhibitory receptors PD-1, TIGIT and Lag-3.

[0754] B. Binding to Exhausted T Cells

[0755] Exhausted T cells were generated as described above by three rounds of stimulation and expansion with K562/OKT3+IL-2. Binding studies were performed essentially as described in Example 12 except with exhausted T cells. Exemplary stack molecules tested included PD-L1/CD155 Stack 4 (SEQ ID NO: 1719) and PD-L1/CD112/CD155 Stack 2 (SEQ ID NO: 1724) generated as described above in Example 10. As a control, binding activity of non-stack formats of each variant IgV fused to an Fc (set forth in SEQ ID NO: 1157, containing the mutations C220S, R292C, N297G and V302C by EU numbering (corresponding to C5S, R77C, N82G and V87C with reference to wild-type human IgG1 Fc set forth in SEQ ID NO: 187), were assessed, i.e., variant PD-L1 IgV-Fc (containing variant PD-L1 IgV set forth in SEQ ID NO:303), CD155 IgV-Fc (containing variant CD155 IgV set forth in SEQ ID NO:1576), or CD112 IgV-Fc (containing variant CD112 IgV set forth in SEQ ID NO: 768).

[0756] Results for the binding studies for exemplary tested PD-L1/CD155 and PD-L1/CD112/CD155 stack Fc fusion molecules tested at various concentrations are shown in FIG. 11. As shown, the exemplary tested PD-L1/CD155 stack Fc fusion molecule demonstrated superior binding to exhausted T cells than either domain alone.

[0757] C. Stimulation and Assessment of Bioactivity

[0758] Previously derived exhausted T cells, generated as described above, were thawed and plated at 100,000 cells per well in a flat-bottom 96-well plate in assay buffer (X-vivo 15 media (Lonza, Corp., USA) supplemented with Glutamax (ThermoFisher, Inc. USA)). An exemplary stack Fc fusion molecule PD-L1/CD155 Stack 4 (SEQ ID NO: 1719), or control non-stack variant PD-L1 IgV-Fc or CD155 IgV-Fc were added to the T cells at final concentrations of 100 nM, 10 nM and 1 nM. The control non-stack variant PD-L1 IgV-Fc or CD155 IgV-Fc fusion molecules contained the same variant PD-L1 IgV (SEQ ID NO:303) or variant CD155 IgV (SEQ ID NO:1576), used in the stacks. An anti-TIGIT antibody (eBioscience, Inc., USA) and anti-PD-1 antibody (Bristol-Myers Squibb, Inc., USA) or human IgG1 antibody (BioLegend, Inc., USA) were also used as controls and added to the T cells at the indicated concentrations.

[0759] K562 cells previously transduced to express anti-CD3 single-chain Fv (OKT3) and human PD-L1 were treated for 20 minutes with 50 μg/mL mitomycin C (Millipore Sigma, Corp., USA) to arrest proliferation, washed and then added to the assay plate at 10,000 cells per well. As a further control, T cells were incubated with K562-OKT3-PD-L1 cells in the absence of added molecule or T cells were incubated without stimulation with K562-OKT3-PD-L1 cells. The assay plate was then incubated for three days at 37° C. in a humidified, 5% CO₂ incubator. After three days, IL-2, IFNγ and T cell proliferation were measured using standard ELISA and flow cytometry techniques.

[0760] Results for the bioactivity studies are shown in FIG. 12, which sets forth the levels of IFN-gamma in culture supernatants (pg/mL) at the indicated concentrations of the tested molecules. As shown, the exemplary tested PD-L1/CD155 stack Fc fusion molecule exhibited improved activities to increase IFNg production compared to non-stack controls, demonstrating blockade of both PD-1 and TIGIT pathways resulting in increased signal compared to only individual pathway blockade.

[0761] The present invention is not intended to be limited in scope to the particular disclosed embodiments, which are provided, for example, to illustrate various aspects of the invention. Various modifications to the compositions and methods described will become apparent from the description and teachings herein. Such variations may be practiced without departing from the true scope and spirit of the disclosure and are intended to fall within the scope of the present disclosure.

The application's sequence listing, which the Patent Office published only in electronic form, follows.

SEQUENCE LISTING (2032 sequences)

SEQ ID NO: 1 - protein, 288 aa, Homo sapiens
  MISC_FEATURE: CD80(B7-1)
MGHTRRQGTSPSKCPYLNFFQLLVLAGLSHFCSGVIHVTKEVKEVATLSCGHNVSVEELAQTRIYWQKEKKMVLTMMSGDMNIWPEYKNRTIFDITNNLSIVILALRPSDEGTYECVVLKYEKDAFKREHLAEVTLSVKADFPTPSISDFEIPTSNIRRIICSTSGGFPEPHLSWLENGEELNAINTTVSQDPETELYAVSSKLDFNMTTNHSFMCLIKYGHLRVNQTFNWNTTKQEHFPDNLLPSWAITLISVNGIFVICCLTYCFAPRCRERRRNERLRRESVRPV

SEQ ID NO: 2 - protein, 329 aa, Homo sapiens
  MISC_FEATURE: CD86(B7-2)
MDPQCTMGLSNILFVMAFLLSGAAPLKIQAYFNETADLPCQFANSQNQSLSELVVFWQDQENLVLNEVYLGKEKFDSVHSKYMGRTSFDSDSWTLRLHNLQIKDKGLYQCIIHHKKPTGMIRIHQMNSELSVLANFSQPEIVPISNITENVYINLTCSSIHGYPEPKKMSVLLRTKNSTIEYDGVMQKSQDNVTELYDVSISLSVSFPDVTSNMTIFCILETDKTRLLSSPFSIELEDPQPPPDHIPWITAVLPTVIICVMVFCLILWKWKKKKRPRNSYKCGTNTMEREESEQTKKREKIHIPERSDEAQRVFKSSKTSSCDKSDTCF

SEQ ID NO: 3 - protein, 290 aa, Homo sapiens
  MISC_FEATURE: CD274 (PD-L1, B7-H1)
MRIFAVFIFMTYWHLLNAFTVTVPKDLYVVEYGSNMTIECKFPVEKQLDLAALIVYWEMEDKNIIQFVHGEEDLKVQHSSYRQRARLLKDQLSLGNAALQITDVKLQDAGVYRCMISYGGADYKRITVKVNAPYNKINQRILVVDPVTSEHELTCQAEGYPKAEVIWTSSDHQVLSGKTTTTNSKREEKLFNVTSTLRINTTTNEIFYCTFRRLDPEENHTAELVIPELPLAHPPNERTHLVILGAILLCLGVALTFIFRLRKGRMMDVKKCGIQDTNSKKQSDTHLEET

SEQ ID NO: 4 - protein, 273 aa, Homo sapiens
  MISC_FEATURE: PDCD1LG2(PD-L2, CD273)
MIFLLLMLSLELQLHQIAALFTVTVPKELYIIEHGSNVTLECNFDTGSHVNLGAITASLQKVENDTSPHRERATLLEEQLPLGKASFHIPQVQVRDEGQYQCIIIYGVAWDYKYLTLKVKASYRKINTHILKVPETDEVELTCQATGYPLAEVSWPNVSVPANTSHSRTPEGLYQVTSVLRLKPPPGRNFSCVFWNTHVRELTLASIDLQSQMEPRTHPTWLLHIFIPFCIIAFIFIATVIALRKQLCQKLYSSKDTTKRPVTTTKREVNSAI

SEQ ID NO: 5 - protein, 302 aa, Homo sapiens
  MISC_FEATURE: ICOSLG(B7RP1, CD275, ICOSL, B7-H2)
MRLGSPGLLFLLFSSLRADTQEKEVRAMVGSDVELSCACPEGSRFDLNDVYVYWQTSESKTVVTYHIPQNSSLENVDSRYRNRALMSPAGMLRGDFSLRLFNVTPQDEQKFHCLVLSQSLGFQEVLSVEVTLHVAANFSVPVVSAPHSPSQDELTFTCTSINGYPRPNVYWINKTDNSLLDQALQNDTVFLNMRGLYDVVSVLRIARTPSVNIGCCIENVLLQQNLTVGSQTGNDIGERDKITENPVSTGEKNAATWSILAVLCLLVVVAVAIGWVCRDRCLQHSYAGAWAVSPETELTGHV

SEQ ID NO: 6 - protein, 534 aa, Homo sapiens
  MISC_FEATURE: CD276(B7-H3)
MLRRRGSPGMGVHVGAALGALWFCLTGALEVQVPEDPVVALVGTDATLCCSFSPEPGFSLAQLNLIWQLTDTKQLVHSFAEGQDQGSAYANRTALFPDLLAQGNASLRLQRVRVADEGSFTCFVSIRDFGSAAVSLQVAAPYSKPSMTLEPNKDLRPGDTVTITCSSYQGYPEAEVFWQDGQGVPLTGNVTTSQMANEQGLFDVHSILRVVLGANGTYSCLVRNPVLQQDAHSSVTITPQRSPTGAVEVQVPEDPVVALVGTDATLRCSFSPEPGFSLAQLNLIWQLTDTKQLVHSFTEGRDQGSAYANRTALFPDLLAQGNASLRLQRVRVADEGSFTCFVSIRDFGSAAVSLQVAAPYSKPSMTLEPNKDLRPGDTVTITCSSYRGYPEAEVFWQDGQGVPLTGNVTTSQMANEQGLFDVHSVLRVVLGANGTYSCLVRNPVLQQDAHGSVTITGQPMTFPPEALWVTVGLSVCLIALLVALAFVCWRKIKQSCEEENAGAEDQDGEGEGSKTALQPLKHSDSKEDDGQEIA

SEQ ID NO: 7 - protein, 282 aa, Homo sapiens
  MISC_FEATURE: VTCN1(B7-H4)
MASLGQILFWSIISIIIILAGAIALIIGFGISGRHSITVTTVASAGNIGEDGILSCTFEPDIKLSDIVIQWLKEGVLGLVHEFKEGKDELSEQDEMFRGRTAVFADQVIVGNASLRLKNVQLTDAGTYKCYIITSKGKGNANLEYKTGAFSMPEVNVDYNASSETLRCEAPRWFPQPTVVWASQVDQGANFSEVSNTSFELNSENVTMKVVSVLYNVTINNTYSCMIENDIAKATGDIKVTESEIKRRSHLQLLNSKASLCVSSFFAISWALLPLSPYLMLK

SEQ ID NO: 8 - protein, 220 aa, Homo sapiens
  MISC_FEATURE: CD28
MLRLLLALNLFPSIQVTGNKILVKQSPMLVAYDNAVNLSCKYSYNLFSREFRASLHKGLDSAVEVCVVYGNYSQQLQVYSKTGFNCDGKLGNESVTFYLQNLYVNQTDIYFCKIEVMYPPPYLDNEKSNGTIIHVKGKHLCPSPLFPGPSKPFWVLVVVGGVLACYSLLVTVAFIIFWVRSKRSRLLHSDYMNMTPRRPGPTRKHYQPYAPPRDFAAYRS

SEQ ID NO: 9 - protein, 223 aa, Homo sapiens
  MISC_FEATURE: CTLA4
MACLGFQRHKAQLNLATRTWPCTLLFFLLFIPVFCKAMHVAQPAVVLASSRGIASFVCEYASPGKATEVRVTVLRQADSQVTEVCAATYMMGNELTFLDDSICTGTSSGNQVNLTIQGLRAMDTGLYICKVELMYPPPYYLGIGNGTQIYVIDPEPCPDSDFLLWILAAVSSGLFFYSFLLTAVSLSKMLKKRSPLTTGVYVKMPPTEPECEKQFQPYFIPIN

SEQ ID NO: 10 - protein, 288 aa, Homo sapiens
  MISC_FEATURE: PDCD1(PD-1)
MQIPQAPWPVVWAVLQLGWRPGWFLDSPDRPWNPPTFSPALLVVTEGDNATFTCSFSNTSESFVLNWYRMSPSNQTDKLAAFPEDRSQPGQDCRFRVTQLPNGRDFHMSVVRARRNDSGTYLCGAISLAPKAQIKESLRAELRVTERRAEVPTAHPSPSPRPAGQFQTLVVGVVGGLLGSLVLLVWVLAVICSRAARGTIGARRTGQPLKEDPSAVPVFSVDYGELDFQWREKTPEPPVPCVPEQTEYATIVFPSGMGTSSPARRGSADGPRSAQPLRPEDGHCSWPL

SEQ ID NO: 11 - protein, 199 aa, Homo sapiens
  MISC_FEATURE: ICOS
MKSGLWYFFLFCLRIKVLTGEINGSANYEMFIFHNGGVQILCKYPDIVQQFKMQLLKGGQILCDLTKTKGSGNTVSIKSLKFCHSQLSNNSVSFFLYNLDHSHANYYFCNLSIFDPPPFKVTLTGGYLHIYESQLCCQLKFWLPIGCAAFVVVCILGCILICWLTKKKYSSSVHDPNGEYMFMRAVNTAKKSRLTDVTL

SEQ ID NO: 12 - protein, 289 aa, Homo sapiens
  MISC_FEATURE: BTLA(CD272)
MKTLPAMLGTGKLFWVFFLIPYLDIWNIHGKESCDVQLYIKRQSEHSILAGDPFELECPVKYCANRPHVTWCKLNGTTCVKLEDRQTSWKEEKNISFFILHFEPVLPNDNGSYRCSANFQSNLIESHSTTLYVTDVKSASERPSKDEMASRPWLLYRLLPLGGLPLLITTCFCLFCCLRRHQGKQNELSDTAGREINLVDAHLKSEQTEASTRQNSQVLLSETGIYDNDPDLCFRMQEGSEVYSNPCLEENKPGIVYASLNHSVIGPNSRLARNVKEAPTEYASICVRS

SEQ ID NO: 13 - protein, 458 aa, Homo sapiens
  MISC_FEATURE: CD4
MNRGVPFRHLLLVLQLALLPAATQGKKVVLGKKGDTVELTCTASQKKSIQFHWKNSNQIKILGNQGSFLTKGPSKLNDRADSRRSLWDQGNFPLIIKNLKIEDSDTYICEVEDQKEEVQLLVFGLTANSDTHLLQGQSLTLTLESPPGSSPSVQCRSPRGKNIQGGKTLSVSQLELQDSGTWTCTVLQNQKKVEFKIDIVVLAFQKASSIVYKKEGEQVEFSFPLAFTVEKLTGSGELWWQAERASSSKSWITFDLKNKEVSVKRVTQDPKLQMGKKLPLHLTLPQALPQYAGSGNLTLALEAKTGKLHQEVNLVVMRATQLQKNLTCEVWGPTSPKLMLSLKLENKEAKVSKREKAVWVLNPEAGMWQCLLSDSGQVLLESNIKVLPTWSTPVQPMALIVLGGVAGLLLFIGLGIFFCVRCRHRRRQAERMSQIKRLLSEKKTCQCPHRFQKTCSPI

SEQ ID NO: 14 - protein, 235 aa, Homo sapiens
  MISC_FEATURE: CD8A(CD8-alpha)
MALPVTALLLPLALLLHAARPSQFRVSPLDRTWNLGETVELKCQVLLSNPTSGCSWLFQPRGAAASPTFLLYLSQNKPKAAEGLDTQRFSGKRLGDTFVLTLSDFRRENEGYYFCSALSNSIMYFSHFVPVFLPAKPTTTPAPRPPTPAPTIASQPLSLRPEACRPAAGGAVHTRGLDFACDIYIWAPLAGTCGVLLLSLVITLYCNHRNRRRVCKCPRPVVKSGDKPSLSARYV

SEQ ID NO: 15 - protein, 210 aa, Homo sapiens
  MISC_FEATURE: CD8B(CD8-beta)
MRPRLWLLLAAQLTVLHGNSVLQQTPAYIKVQTNKMVMLSCEAKISLSNMRIYWLRQRQAPSSDSHHEFLALWDSAKGTIHGEEVEQEKIAVFRDASRFILNLTSVKPEDSGIYFCMIVGSPELTFGKGTQLSVVDFLPTTAQPTKKSTLKKRVCRLPRPETQKGPLCSPITLGLLVAGVLVLLVSLGVAIHLCCRRRRARLRFMKQFYK

SEQ ID NO: 16 - protein, 525 aa, Homo sapiens
  MISC_FEATURE: LAG3
MWEAQFLGLLFLQPLWVAPVKPLQPGAEVPVVWAQEGAPAQLPCSPTIPLQDLSLLRRAGVTWQHQPDSGPPAAAPGHPLAPGPHPAAPSSWGPRPRRYTVLSVGPGGLRSGRLPLQPRVQLDERGRQRGDFSLWLRPARRADAGEYRAAVHLRDRALSCRLRLRLGQASMTASPPGSLRASDWVILNCSFSRPDRPASVHWFRNRGQGRVPVRESPHHHLAESFLFLPQVSPMDSGPWGCILTYRDGFNVSIMYNLTVLGLEPPTPLTVYAGAGSRVGLPCRLPAGVGTRSFLTAKWTPPGGGPDLLVTGDNGDFTLRLEDVSQAQAGTYTCHIHLQEQQLNATVTLAIITVTPKSFGSPGSLGKLLCEVTPVSGQERFVWSSLDTPSQRSFSGPWLEAQEAQLLSQPWQCQLYQGERLLGAAVYFTELSSPGAQRSGRAPGALPAGHLLLFLILGVLSLLLLVTGAFGFHLWRRQWRPRRFSALEQGIHPPQAQSKIEELEQEPEPEPEPEPEPEPEPEPEQL

SEQ ID NO: 17 - protein, 301 aa, Homo sapiens
  MISC_FEATURE: HAVCR2(TIM-3)
MFSHLPFDCVLLLLLLLLTRSSEVEYRAEVGQNAYLPCFYTPAAPGNLVPVCWGKGACPVFECGNVVLRTDERDVNYWTSRYWLNGDFRKGDVSLTIENVTLADSGIYCCRIQIPGIMNDEKFNLKLVIKPAKVTPAPTRQRDFTAAFPRMLTTRGHGPAETQTLGSLPDINLTQISTLANELRDSRLANDLRDSGATIRIGIYIGAGICAGLALALIFGALIFKWYSHSKEKIQNLSLISLANLPPSGLANAVAEGIRSEENIYTIEENVYEVEEPNEYYCYVSSRQQPSQPLGCRFAMP

SEQ ID NO: 18 - protein, 526 aa, Homo sapiens
  MISC_FEATURE: CEACAM1
MGHLSAPLHRVRVPWQGLLLTASLLTFWNPPTTAQLTTESMPFNVAEGKEVLLLVHNLPQQLFGYSWYKGERVDGNRQIVGYAIGTQQATPGPANSGRETIYPNASLLIQNVTQNDTGFYTLQVIKSDLVNEEATGQFHVYPELPKPSISSNNSNPVEDKDAVAFTCEPETQDTTYLWWINNQSLPVSPRLQLSNGNRTLTLLSVTRNDTGPYECEIQNPVSANRSDPVTLNVTYGPDTPTISPSDTYYRPGANLSLSCYAASNPPAQYSWLINGTFQQSTQELFIPNITVNNSGSYTCHANNSVTGCNRTTVKTIIVTELSPVVAKPQIKASKTTVTGDKDSVNLTCSTNDTGISIRWFFKNQSLPSSERMKLSQGNTTLSINPVKREDAGTYWCEVFNPISKNQSDPIMLNVNYNALPQENGLSPGAIAGIVIGVVALVALIAVALACFLHFGKTGRASDQRDLTEHKPSVSNHTQDHSNDPPNKMNEVTYSTLNFEAQQPTQPTSASPSLTATEIIYSEVKKQ

SEQ ID NO: 19 - protein, 244 aa, Homo sapiens
  MISC_FEATURE: TIGIT
MRWCLLLIWAQGLRQAPLASGMMTGTIETTGNISAEKGGSIILQCHLSSTTAQVTQVNWEQQDQLLAICNADLGWHISPSFKDRVAPGPGLGLTLQSLTVNDTGEYFCIYHTYPDGTYTGRIFLEVLESSVAEHGARFQIPLLGAMAATLVVICTAVIVVVALTRKKKALRIHSVEGDLRRKSAGQEEWSPSAPSPPGSCVQAEAAPAGLCGEQRGEDCAELHDYFNVLSYRSLGNCSFFTETG

SEQ ID NO: 20 - protein, 417 aa, Homo sapiens
  MISC_FEATURE: PVR(CD155)
MARAMAAAWPLLLVALLVLSWPPPGTGDVVVQAPTQVPGFLGDSVTLPCYLQVPNMEVTHVSQLTWARHGESGSMAVFHQTQGPSYSESKRLEFVAARLGAELRNASLRMFGLRVEDEGNYTCLFVTFPQGSRSVDIWLRVLAKPQNTAEVQKVQLTGEPVPMARCVSTGGRPPAQITWHSDLGGMPNTSQVPGFLSGTVTVTSLWILVPSSQVDGKNVTCKVEHESFEKPQLLTVNLTVYYPPEVSISGYDNNWYLGQNEATLTCDARSNPEPTGYNWSTTMGPLPPFAVAQGAQLLIRPVDKPINTTLICNVTNALGARQAELTVQVKEGPPSEHSGISRNAIIFLVLGILVFLILLGIGIYFYWSKCSREVLWHCHLCPSSTEHASASANGHVSYSAVSRENSSSQDPQTEGTR

SEQ ID NO: 21 - protein, 538 aa, Homo sapiens
  MISC_FEATURE: PVRL2(CD112)
MARAAALLPSRSPPTPLLWPLLLLLLLETGAQDVRVQVLPEVRGQLGGTVELPCHLLPPVPGLYISLVTWQRPDAPANHQNVAAFHPKMGPSFPSPKPGSERLSFVSAKQSTGQDTEAELQDATLALHGLTVEDEGNYTCEFATFPKGSVRGMTWLRVIAKPKNQAEAQKVTFSQDPTTVALCISKEGRPPARISWLSSLDWEAKETQVSGTLAGTVTVTSRFTLVPSGRADGVTVTCKVEHESFEEPALIPVTLSVRYPPEVSISGYDDNWYLGRTDATLSCDVRSNPEPTGYDWSTTSGTFPTSAVAQGSQLVIHAVDSLFNTTFVCTVTNAVGMGRAEQVIFVRETPNTAGAGATGGIIGGIIAAIIATAVAATGILICRQQRKEQTLQGAEEDEDLEGPPSYKPPTPKAKLEAQEMPSQLFTLGASEHSPLKTPYFDAGASCTEQEMPRYHELPTLEERSGPLHPGATSLGSPIPVPPGPPAVEDVSLDLEDEEGEEEEEYLDKINPIYDALSYSSPSDSYQGKGFVMSRAMYV

SEQ ID NO: 22 - protein, 336 aa, Homo sapiens
  MISC_FEATURE: CD226
MDYPTLLLALLHVYRALCEEVLWHTSVPFAENMSLECVYPSMGILTQVEWFKIGTQQDSIAIFSPTHGMVIRKPYAERVYFLNSTMASNNMTLFFRNASEDDVGYYSCSLYTYPQGTWQKVIQVVQSDSFEAAVPSNSHIVSEPGKNVTLTCQPQMTWPVQAVRWEKIQPRQIDLLTYCNLVHGRNFTSKFPRQIVSNCSHGRWSVIVIPDVTVSDSGLYRCYLQASAGENETFVMRLTVAEGKTDNQYTLFVAGGTVLLLLFVISITTIIVIFLNRRRRRERRDLFTESWDTQKAPNNYRSPISTSQPTNQSMDDTREDIYVNYPTFSRRPKTRV

SEQ ID NO: 23 - protein, 351 aa, Homo sapiens
  MISC_FEATURE: CD2
MSFPCKFVASFLLIFNVSSKGAVSKEITNALETWGALGQDINLDIPSFQMSDDIDDIKWEKTSDKKKIAQFRKEKETFKEKDTYKLFKNGTLKIKHLKTDDQDIYKVSIYDTKGKNVLEKIFDLKIQERVSKPKISWTCINTTLTCEVMNGTDPELNLYQDGKHLKLSQRVITHKWTTSLSAKFKCTAGNKVSKESSVEPVSCPEKGLDIYLIIGICGGGSLLMVFVALLVFYITKRKKQRSRRNDEELETRAHRVATEERGRKPHQIPASTPQNPATSQHPPPPPGHRSQAPSHRPPPPGHRVQHQPQKRPPAPSGTQVHQQKGPPLPRPRVQPKPPHGAAENSLSPSSN

SEQ ID NO: 24 - protein, 180 aa, Homo sapiens
  MISC_FEATURE: CD160
MLLEPGRGCCALAILLAIVDIQSGGCINITSSASQEGTRLNLICTVWHKKEEAEGFVVFLCKDRSGDCSPETSLKQLRLKRDPGIDGVGEISSQLMFTISQVTPLHSGTYQCCARSQKSGIRLQGHFFSILFTETGNYTVTGLKQRQHLEFSHNEGTLSSGFLQEKVWVMLVTSLVALQA

SEQ ID NO: 25 - protein, 278 aa, Homo sapiens
  MISC_FEATURE: CD200
MERLVIRMPFSHLSTYSLVWVMAAVVLCTAQVQVVTQDEREQLYTPASLKCSLQNAQEALIVTWQKKKAVSPENMVTFSENHGVVIQPAYKDKINITQLGLQNSTITFWNITLEDEGCYMCLFNTFGFGKISGTACLTVYVQPIVSLHYKFSEDHLNITCSATARPAPMVFWKVPRSGIENSTVTLSHPNGTTSVTSILHIKDPKNQVGKEVICQVLHLGTVTDFKQTVNKGYWFSVPLLLSIVSLVILLVLISILLYWKRHRNQDRGELSQGVQKMT

SEQ ID NO: 26 - protein, 325 aa, Homo sapiens [sequence omitted]

SEQ ID NO: 27 - protein, 201 aa, Homo sapiens
  MISC_FEATURE: NC R3 (NKp30)
MAWMLLLILIMVHPGSCALWVSQPPEIRTLEGSSAFLPCSFNASQGRLAIGSVTWFRDEVVPGKEVRNGTPEFRGRLAPLASSRFLHDHQAELHIRDVRGHDASIYVCRVEVLGLGVGTGNGTRLVVEKEHPQLGAGTVLLLRAGFYAVSFLSVAVGSTVYYQGKCLTWKGPRRQLPAVVPAPLPPPCGSSAHLLPPVPGG

SEQ ID NO: 28 - protein, 208 aa, Homo sapiens [sequence omitted]

SEQ ID NO: 29 - protein, 224 aa, Homo sapiens
  MISC_FEATURE: CD86(B7-2) ECD
APLKIQAYFNETADLPCQFANSQNQSLSELVVFWQDQENLVLNEVYLGKEKFDSVHSKYMGRTSFDSDSWTLRLHNLQIKDKGLYQCIIHHKKPTGMIRIHQMNSELSVLANFSQPEIVPISNITENVYINLTCSSIHGYPEPKKMSVLLRTKNSTIEYDGVMQKSQDNVTELYDVSISLSVSFPDVTSNMTIFCILETDKTRLLSSPFSIELEDPQPPPDHIP

SEQ ID NO: 30 - protein, 220 aa, Homo sapiens
  MISC_FEATURE: CD274 (PD-L1, B7-H1) ECD
FTVTVPKDLYVVEYGSNMTIECKFPVEKQLDLAALIVYWEMEDKNIIQFVHGEEDLKVQHSSYRQRARLLKDQLSLGNAALQITDVKLQDAGVYRCMISYGGADYKRITVKVNAPYNKINQRILVVDPVTSEHELTCQAEGYPKAEVIWTSSDHQVLSGKTTTTNSKREEKLFNVTSTLRINTTTNEIFYCTFRRLDPEENHTAELVIPELPLAHPPNER

SEQ ID NO: 31 - protein, 201 aa, Homo sapiens
  MISC_FEATURE: PDCD1LG2(PD-L2, CD273) ECD
LFTVTVPKELYIIEHGSNVTLECNFDTGSHVNLGAITASLQKVENDTSPHRERATLLEEQLPLGKASFHIPQVQVRDEGQYQCIIIYGVAWDYKYLTLKVKASYRKINTHILKVPETDEVELTCQATGYPLAEVSWPNVSVPANTSHSRTPEGLYQVTSVLRLKPPPGRNFSCVFWNTHVRELTLASIDLQSQMEPRTHPT

SEQ ID NO: 32 - protein, 238 aa, Homo sapiens [sequence omitted]

SEQ ID NO: 33 - protein, 438 aa, Homo sapiens
  MISC_FEATURE: CD276(B7-H3) ECD
LEVQVPEDPVVALVGTDATLCCSFSPEPGFSLAQLNLIWQLTDTKQLVHSFAEGQDQGSAYANRTALFPDLLAQGNASLRLQRVRVADEGSFTCFVSIRDFGSAAVSLQVAAPYSKPSMTLEPNKDLRPGDTVTITCSSYQGYPEAEVFWQDGQGVPLTGNVTTSQMANEQGLFDVHSILRVVLGANGTYSCLVRNPVLQQDAHSSVTITPQRSPTGAVEVQVPEDPVVALVGTDATLRCSFSPEPGFSLAQLNLIWQLTDTKQLVHSFTEGRDQGSAYANRTALFPDLLAQGNASLRLQRVRVADEGSFTCFVSIRDFGSAAVSLQVAAPYSKPSMTLEPNKDLRPGDTVTITCSSYRGYPEAEVFWQDGQGVPLTGNVTTSQMANEQGLFDVHSVLRVVLGANGTYSCLVRNPVLQQDAHGSVTITGQPMTFPPEA

SEQ ID NO: 34 - protein, 235 aa, Homo sapiens
  MISC_FEATURE: VTCN1(B7-H4) ECD
LIIGFGISGRHSITVTTVASAGNIGEDGILSCTFEPDIKLSDIVIQWLKEGVLGLVHEFKEGKDELSEQDEMFRGRTAVFADQVIVGNASLRLKNVQLTDAGTYKCYIITSKGKGNANLEYKTGAFSMPEVNVDYNASSETLRCEAPRWFPQPTVVWASQVDQGANFSEVSNTSFELNSENVTMKVVSVLYNVTINNTYSCMIENDIAKATGDIKVTESEIKRRSHLQLLNSKAS

SEQ ID NO: 35 - protein, 134 aa, Homo sapiens
  MISC_FEATURE: CD28 ECD
NKILVKQSPMLVAYDNAVNLSCKYSYNLFSREFRASLHKGLDSAVEVCVVYGNYSQQLQVYSKTGFNCDGKLGNESVTFYLQNLYVNQTDIYFCKIEVMYPPPYLDNEKSNGTIIHVKGKHLCPSPLFPGPSKP

SEQ ID NO: 36 - protein, 126 aa, Homo sapiens [sequence omitted]

SEQ ID NO: 37 - protein, 150 aa, Homo sapiens [sequence omitted]

SEQ ID NO: 38 - protein, 120 aa, Homo sapiens
  MISC_FEATURE: ICOS ECD
EINGSANYEMFIFHNGGVQILCKYPDIVQQFKMQLLKGGQILCDLTKTKGSGNTVSIKSLKFCHSQLSNNSVSFFLYNLDHSHANYYFCNLSIFDPPPFKVTLTGGYLHIYESQLCCQLK

SEQ ID NO: 39 - protein, 127 aa, Homo sapiens
  MISC_FEATURE: BTLA(CD272) ECD
KESCDVQLYIKRQSEHSILAGDPFELECPVKYCANRPHVTWCKLNGTTCVKLEDRQTSWKEEKNISFFILHFEPVLPNDNGSYRCSANFQSNLIESHSTTLYVTDVKSASERPSKDEMASRPWLLYR

SEQ ID NO: 40 - protein, 371 aa, Homo sapiens
  MISC_FEATURE: CD4 ECD
KKVVLGKKGDTVELTCTASQKKSIQFHWKNSNQIKILGNQGSFLTKGPSKLNDRADSRRSLWDQGNFPLIIKNLKIEDSDTYICEVEDQKEEVQLLVFGLTANSDTHLLQGQSLTLTLESPPGSSPSVQCRSPRGKNIQGGKTLSVSQLELQDSGTWTCTVLQNQKKVEFKIDIVVLAFQKASSIVYKKEGEQVEFSFPLAFTVEKLTGSGELWWQAERASSSKSWITFDLKNKEVSVKRVTQDPKLQMGKKLPLHLTLPQALPQYAGSGNLTLALEAKTGKLHQEVNLVVMRATQLQKNLTCEVWGPTSPKLMLSLKLENKEAKVSKREKAVWVLNPEAGMWQCLLSDSGQVLLESNIKVLPTWSTPVQP

SEQ ID NO: 41 - protein, 161 aa, Homo sapiens
  MISC_FEATURE: CD8A(CD8-alpha) ECD
SQFRVSPLDRTWNLGETVELKCQVLLSNPTSGCSWLFQPRGAAASPTFLLYLSQNKPKAAEGLDTQRFSGKRLGDTFVLTLSDFRRENEGYYFCSALSNSIMYFSHFVPVFLPAKPTTTPAPRPPTPAPTIASQPLSLRPEACRPAAGGAVHTRGLDFACD

SEQ ID NO: 42 - protein, 149 aa, Homo sapiens
  MISC_FEATURE: CD8B(CD8-beta) ECD
LQQTPAYIKVQTNKMVMLSCEAKISLSNMRIYWLRQRQAPSSDSHHEFLALWDSAKGTIHGEEVEQEKIAVFRDASRFILNLTSVKPEDSGIYFCMIVGSPELTFGKGTQLSVVDFLPTTAQPTKKSTLKKRVCRLPRPETQKGPLCSP

SEQ ID NO: 43 - protein, 422 aa, Homo sapiens
  MISC_FEATURE: LAG3 ECD
VPVVWAQEGAPAQLPCSPTIPLQDLSLLRRAGVTWQHQPDSGPPAAAPGHPLAPGPHPAAPSSWGPRPRRYTVLSVGPGGLRSGRLPLQPRVQLDERGRQRGDFSLWLRPARRADAGEYRAAVHLRDRALSCRLRLRLGQASMTASPPGSLRASDWVILNCSFSRPDRPASVHWFRNRGQGRVPVRESPHHHLAESFLFLPQVSPMDSGPWGCILTYRDGFNVSIMYNLTVLGLEPPTPLTVYAGAGSRVGLPCRLPAGVGTRSFLTAKWTPPGGGPDLLVTGDNGDFTLRLEDVSQAQAGTYTCHIHLQEQQLNATVTLAIITVTPKSFGSPGSLGKLLCEVTPVSGQERFVWSSLDTPSQRSFSGPWLEAQEAQLLSQPWQCQLYQGERLLGAAVYFTELSSPGAQRSGRAPGALPAGHL

SEQ ID NO: 44 - protein, 181 aa, Homo sapiens
  MISC_FEATURE: HAVCR2(TIM-3) ECD
SEVEYRAEVGQNAYLPCFYTPAAPGNLVPVCWGKGACPVFECGNVVLRTDERDVNYWTSRYWLNGDFRKGDVSLTIENVTLADSGIYCCRIQIPGIMNDEKFNLKLVIKPAKVTPAPTRQRDFTAAFPRMLTTRGHGPAETQTLGSLPDINLTQISTLANELRDSRLANDLRDSGATIRIG

SEQ ID NO: 45 - protein, 394 aa, Homo sapiens
  MISC_FEATURE: CEACAM1 ECD
QLTTESMPFNVAEGKEVLLLVHNLPQQLFGYSWYKGERVDGNRQIVGYAIGTQQATPGPANSGRETIYPNASLLIQNVTQNDTGFYTLQVIKSDLVNEEATGQFHVYPELPKPSISSNNSNPVEDKDAVAFTCEPETQDTTYLWWINNQSLPVSPRLQLSNGNRTLTLLSVTRNDTGPYECEIQNPVSANRSDPVTLNVTYGPDTPTISPSDTYYRPGANLSLSCYAASNPPAQYSWLINGTFQQSTQELFIPNITVNNSGSYTCHANNSVTGCNRTTVKTIIVTELSPVVAKPQIKASKTTVTGDKDSVNLTCSTNDTGISIRWFFKNQSLPSSERMKLSQGNTTLSINPVKREDAGTYWCEVFNPISKNQSDPIMLNVNYNALPQENGLSPG

SEQ ID NO: 46 - protein, 120 aa, Homo sapiens
  MISC_FEATURE: TIGIT ECD
MMTGTIETTGNISAEKGGSIILQCHLSSTTAQVTQVNWEQQDQLLAICNADLGWHISPSFKDRVAPGPGLGLTLQSLTVNDTGEYFCIYHTYPDGTYTGRIFLEVLESSVAEHGARFQIP

SEQ ID NO: 47 - protein, 323 aa, Homo sapiens
  MISC_FEATURE: PVR(CD155) ECD
WPPPGTGDVVVQAPTQVPGFLGDSVTLPCYLQVPNMEVTHVSQLTWARHGESGSMAVFHQTQGPSYSESKRLEFVAARLGAELRNASLRMFGLRVEDEGNYTCLFVTFPQGSRSVDIWLRVLAKPQNTAEVQKVQLTGEPVPMARCVSTGGRPPAQITWHSDLGGMPNTSQVPGFLSGTVTVTSLWILVPSSQVDGKNVTCKVEHESFEKPQLLTVNLTVYYPPEVSISGYDNNWYLGQNEATLTCDARSNPEPTGYNWSTTMGPLPPFAVAQGAQLLIRPVDKPINTTLICNVTNALGARQAELTVQVKEGPPSEHSGISRN

SEQ ID NO: 48 - protein, 329 aa, Homo sapiens
  MISC_FEATURE: PVRL2(CD112) ECD
QDVRVQVLPEVRGQLGGTVELPCHLLPPVPGLYISLVTWQRPDAPANHQNVAAFHPKMGPSFPSPKPGSERLSFVSAKQSTGQDTEAELQDATLALHGLTVEDEGNYTCEFATFPKGSVRGMTWLRVIAKPKNQAEAQKVTFSQDPTTVALCISKEGRPPARISWLSSLDWEAKETQVSGTLAGTVTVTSRFTLVPSGRADGVTVTCKVEHESFEEPALIPVTLSVRYPPEVSISGYDDNWYLGRTDATLSCDVRSNPEPTGYDWSTTSGTFPTSAVAQGSQLVIHAVDSLFNTTFVCTVTNAVGMGRAEQVIFVRETPNTAGAGATGG

SEQ ID NO: 49 - protein, 236 aa, Homo sapiens [sequence omitted]

SEQ ID NO: 50 - protein, 185 aa, Homo sapiens
  MISC_FEATURE: CD2 ECD
KEITNALETWGALGQDINLDIPSFQMSDDIDDIKWEKTSDKKKIAQFRKEKETFKEKDTYKLFKNGTLKIKHLKTDDQDIYKVSIYDTKGKNVLEKIFDLKIQERVSKPKISWTCINTTLTCEVMNGTDPELNLYQDGKHLKLSQRVITHKWTTSLSAKFKCTAGNKVSKESSVEPVSCPEKGLD

SEQ ID NO: 51 - protein, 133 aa, Homo sapiens
  MISC_FEATURE: CD160 ECD
INITSSASQEGTRLNLICTVWHKKEEAEGFVVFLCKDRSGDCSPETSLKQLRLKRDPGIDGVGEISSQLMFTISQVTPLHSGTYQCCARSQKSGIRLQGHFFSILFTETGNYTVTGLKQRQHLEFSHNEGTLS

SEQ ID NO: 52 - protein, 202 aa, Homo sapiens
  MISC_FEATURE: CD200 ECD
QVQVVTQDEREQLYTPASLKCSLQNAQEALIVTWQKKKAVSPENMVTFSENHGVVIQPAYKDKINITQLGLQNSTITFWNITLEDEGCYMCLFNTFGFGKISGTACLTVYVQPIVSLHYKFSEDHLNITCSATARPAPMVFWKVPRSGIENSTVTLSHPNGTTSVTSILHIKDPKNQVGKEVICQVLHLGTVTDFKQTVNKG

SEQ ID NO: 53 - protein, 215 aa, Homo sapiens
  MISC_FEATURE: CD200R1(CD200R) ECD
MDEKQITQNYSKVLAEVNTSWPVKMATNAVLCCPPIALRNLIIITWEIILRGQPSCTKAYRKETNETKETNCTDERITWVSRPDQNSDLQIRPVAITHDGYYRCIMVTPDGNFHRGYHLQVLVTPEVTLFQNRNRTAVCKAVAGKPAAQISWIPEGDCATKQEYWSNGTVTVKSTCHWEVHNVSTVTCHVSHLTGNKSLYIELLPVPGAKKSAKL

SEQ ID NO: 54 - protein, 117 aa, Homo sapiens
  MISC_FEATURE: NC R3 (NKp30) ECD
LWVSQPPEIRTLEGSSAFLPCSFNASQGRLAIGSVTWFRDEVVPGKEVRNGTPEFRGRLAPLASSRFLHDHQAELHIRDVRGHDASIYVCRVEVLGLGVGTGNGTRLVVEKEHPQLG

SEQ ID NO: 55 - protein, 107 aa, Artificial Sequence
  PD-L1 IgV
PKDLYVVEYGSNMTIECKFPVEKQLDLAALIVYWEMEDKNIIQFVHGEEDLKVQHSSYRQRARLLKDQLSLGNAALQITDVKLQDAGVYRCMISYGGADYKRITVKV

SEQ ID NO: 56 - protein, 220 aa, Artificial Sequence
  PD-L1 ECD v1
FTVTVPKDLYVVEYGSNMTIECKFPVENQLDLAALIVYWEVEDKTIIQFVNGEEDLEVQHSSYRQRARLLKDQLSLGNAALQITDVKLQDAGVYRCMISYGGADYKRITVKVNAPYNKINQRILVVDPVTSEHELTCQAEGYPKAEVIWTSSDHQVLSGKTTTTNSKREEKLFNVTSTLRINTTTNEIFYCTFRRLDPEENHTAELVIPELPLAHPPNER

SEQ ID NO: 57 - protein, 220 aa, Artificial Sequence
  PD-L1 ECD v2
FTVTVPKDLYVVEYGSNMTLECKFPVEKQLDLAALTVYWEMEDKDITQFVHGEEDLKVQHSSYRQRARLLKDQLSLGNAALQITDVKLQDAGVYRCMISYGGADYKRITVKVNAPYNKINQRILVVDPVTSEHELTCQAEGYPKAEVIWTSSDHQVLSGKTTTTNSKREEKLFNVTSTLRINTTTNEIFYCTFRRLDPEENHTAELVIPELPLAHPPNER

SEQ ID NO: 58 - protein, 220 aa, Artificial Sequence
  PD-L1 ECD v3
FTVTVPKDLYVVEYGSNMTLECKFPVEKQLDLAALIVYWEKEDENIIQFVHGEEDLKVQHSSYRQRARLLKDQLSLGNAALQITDVKLQDAGVYRCMISYGGADYKRITVKVNAPYNKINQRILVVDPVTSEHELTCQAEGYPKAEVIWTSSDHQVLSGKTTTTNSKREEKLFNVTSTLRINTTTNEIFYCTFRRLDPEENHTAELVIPELPLAHPPNER

SEQ ID NO: 59 - protein, 220 aa, Artificial Sequence
  PD-L1 ECD v4
FTVTVSKDLYVVEYGSNMTIECKFPVEKQLDLAALIVYWEMEDKTIIQFVHGEEDLKVQHSSYRQRARLLKDQLSLGIAALQTTDVKLQDAGVYRCMISYGGADYKRITVKVNAPYNKINQRILVVDPVTSEHELTCQAEGYPKAEVIWTSSDHQVLSGKTTTTNSKREEKLFNVTSTLRINTTTNEIFYCTFRRLDPEENHTAELVIPELPLAHPPNER

SEQ ID NO: 60 - protein, 220 aa, Artificial Sequence
  PD-L1 ECD v5
FTVTVPKDLYVVEYGSNMTIECKFPVEKQLDLAALIVYWEMEDKNIIQFVHGEEDLKVQHSSYRQRARLLKDQLSLGIAALQITDVKLQDAGVYRCMISYGGADYKRITVKVNAPYNKINQRILVVDPVTSEHELTCQAEGYPKAEVIWTSSDHQVLSGKTTTTNSKREEKLFNVTSTLRINTTTNEIFYCTFRRLDPEENHTAELVIPELPLAHPPNER

SEQ ID NO: 61 - protein, 220 aa, Artificial Sequence
  PD-L1 ECD v6
FTVTVPKDLYVVEYGSNMTIECKFPVEKQLDLAALIVYWEKEDKNIIQFVHGEEDLKVQHSSYRQRARLLKDQLSLGIAALQITDVKLQDAGVYRCMISYGGADYKRITVKVNAPYNKINQRILVVDPVTSEHELTCQAEGYPKAEVIWTSSDHQVLSGKTTTTNSKREEKLFNVTSTLRINTTTNEIFYCTFRRLDPEENHTAELVIPELPLAHPPNER

SEQ ID NO: 62 - protein, 220 aa, Artificial Sequence
  PD-L1 ECD v7
FTVTVPKDLYVVEYGSNMTIECKFPVEKQLDLAALIVYWEMEDKTIIQFVHGEEDLKVQHSSYRQRARLLKDQLSLGIAALQITDVKLQDAGVYRCMISYGGADYKRITVKVNAPYNKINQRILVVDPVTSEHELTCQAEGYPKAEVIWTSSDHQVLSGKTTTTNSKREEKLFNVTSTLRINTTTNEIFYCTFRRLDPEENHTAELVIPELPLAHPPNER

SEQ ID NO: 63 - protein, 220 aa, Artificial Sequence
  PD-L1 ECD v8
FTVTVPKDLYVVEYGSNMTLECKFPVEKQLDLAALIVYWEMEDKTIIQFVHGEEDLKVQHSSYRQRARLLKDQLSLGNAALQITDVKLQDAGVYRCMISYGGADYKRITVKVNAPYNKINQRILVVDPVTSEHELTCQAEGYPKAEVIWTSSDHQVLSGKTTTTNSKREEKLFNVTSTLRINTTTNEIFYCTFRRLDPEENHTAELVIPELPLAHPPNER

SEQ ID NO: 64 - protein, 220 aa, Artificial Sequence
  PD-L1 ECD v9
FTVTVPKDLYVVEYGSNMTIECKFPVEKQLDLAALIVYWEMEDKTIIQFVHGEEDLKVQHSSYRQRARLLKDQLSLGNAALQITDVKLQDAGVYRCMISYGGADYKRITVKVNAPYNKINQRILVVDPVTSEHELTCQAEGYPKAEVIWTSSDHQVLSGKTTTTNSKREEKLFNVTSTLRINTTTNEIFYCTFRRLDPEENHTAELVIPELPLAHPPNER

SEQ ID NO: 65 - protein, 220 aa, Artificial Sequence
  PD-L1 ECD v10
FTVTVPKDLYVVEYGSNMTIECKFPVEKQLDLAALIVYWEKEDKNIIQFVHGEEDLKVQHSSYRQRARLLKDQLSLGNAALQITDVKLQDAGVYRCMISYGGADYKRITVKVNAPYNKINQRILVVDPVTSEHELTCQAEGYPKAEVIWTSSDHQVLSGKTTTTNSKREEKLFNVTSTLRINTTTNEIFYCTFRRLDPEENHTAELVIPELPLAHPPNER

SEQ ID NO: 66 - protein, 220 aa, Artificial Sequence
  PD-L1 ECD v11
FTVTVPKDLYVVEYGSNMTLECKFPVEKQLDLAALTVYWEMEDKDIIQFVHGEEDLKVQHSSYRQRARLLKDQLSLGNAALQITDVKLQDAGVYRCMISYGGADYKRITVKVNAPYNKINQRILVVDPVTSEHELTCQAEGYPKAEVIWTSSDHQVLSGKTTTTNSKREEKLFNVTSTLRINTTTNEIFYCTFRRLDPEENHTAELVIPELPLAHPPNER

SEQ ID NO: 67 - protein, 220 aa, Artificial Sequence
  PD-L1 ECD v12
FTVTVPKDLYVVEYGSDMTIECKFPVEKQLDLAALIVYWEMEDKTIIQFAHGEEDLKVQHSSYRQRARLLKGQLSLGNAALQITDVKLQDAGVYRCMISYGGADYKRITVKVNAPYNKINQRILVVDPVTSEHELTCQAEGYPKAEVIWTSSDHQVLSGKTTTTNSKREEKLFNVTSTLRINTTTNEIFYCTFRRLDPEENHTAELVIPELPLAHPPNER

SEQ ID NO: 68 - protein, 220 aa, Artificial Sequence
  PD-L1 ECD v13
FTVTVPKDLYVVEYGSNMTLECKFPVEKQLDLAALIVYWEMEDKNIIQSVHGEEDLKVQHSSYRQRARLLKDQLSLGNAALQITDVKLQDAGVYRCMISYGGADYKRITVKVNAPYNKINQRILVVDPVTSEHELTCQAEGYPKAEVIWTSSDHQVLSGKTTTTNSKREEKLFNVTSTLRINTTTNEIFYCTFRRLDPEENHTAELVIPELPLAHPPNER

SEQ ID NO: 69 - protein, 220 aa, Artificial Sequence
  PD-L1 ECD v14
FTVTVPKDLYVVEYGSNMTIECKFPVEKQLDLAALIVYWEMEDKTIIQFAHGEEDLKVQHSSYRQRARLLKDQLSLGNAALQITDVKLQDAGVYRCMISYGGADYKRITVKVNAPYNKINQRILVVDPVTSEHELTCQAEGYPKAEVIWTSSDHQVLSGKTTTTNSKREEKLFNVTSTLRINTTTNEIFYCTFRRLDPEENHTAELVIPELPLAHPPNER

SEQ ID NO: 70 - protein, 220 aa, Artificial Sequence
  PD-L1 ECD v15
FTVTVPKDLYVVEYGSNMTLECKFPVEKQLDLAALIVYWEMEDKTIIQFVHGEEDLKVQHSSYRQRARLLKDQLSLGIAALQITDVKLQDAGVYRCMISYGGADYKRITVKVNAPYNKINQRILVVDPVTSEHELTCQAEGYPKAEVIWTSSDHQVLSGKTTTTNSKREEKLFNVTSTLRINTTTNEIFYCTFRRLDPEENHTAELVIPELPLAHPPNER

SEQ ID NO: 71 - protein, 220 aa, Artificial Sequence
  PD-L1 ECD v16
FTVTVPKDLYVVEYGSNMTLECKFPVEKQLDLAALIVYWEMEDKTIIQFAHGEEDLKVQHSSYRQRARLLKDQLSLGNAALQITDVKLQDAGVYRCMISYGGADYKRITVKVNAPYNKINQRILVVDPVTSEHELTCQAEGYPKAEVIWTSSDHQVLSGKTTTTNSKREEKLFNVTSTLRINTTTNEIFYCTFRRLDPEENHTAELVIPELPLAHPPNER

SEQ ID NO: 72 - protein, 220 aa, Artificial Sequence
  PD-L1 ECD v17
FTVTVPKDLYVVEYGSNMTIECKFPVEKQLDLAALIVYWEVEDKTIIQFVHGEEDLKVQHSSYRQRARLLKDQLSLGNAALQITDVKLQDAGVYRCMISYGGADYKRITVKVNAPYNKINQRILVVDPVTSEHELTCQAEGYPKAEVIWTSSDHQVLSGKTTTTNSKREEKLFNVTSTLRINTTTNEIFYCTFRRLDPEENHTAELVIPELPLAHPPNER

SEQ ID NO: 73 - protein, 220 aa, Artificial Sequence
  PD-L1 ECD v18
FTVTVPKDLYVVEYGSNMTIECKFPVEKQLDLAALIVYWEKEDKTIIQFVHGEEDLKVQHSSYRQRARLLKDQLSLGNAALQITDVKLQDAGVYRCMISYGGADYKRITVKVNAPYNKINQRILVVDPVTSEHELTCQAEGYPKAEVIWTSSDHQVLSGKTTTTNSKREEKLFNVTSTLRINTTTNEIFYCTFRRLDPEENHTAELVIPELPLAHPPNER

SEQ ID NO: 74 - protein, 220 aa, Artificial Sequence
  PD-L1 ECD v19
FTVTVPKDLYVVEYGSNMTIECKFPVEKQLDLDALIVYWEMEDKNIIQFVHGEEDLKVQHSSYRQRARLLKDQLPLGNAALQITEVKLQDAGVYRCMISYGGADYKRITVKVNAPYNKINQRILVVDPVTSEHELTCQAEGYPKAEVIWTSSDHQVLSGKTTTTNSKREEKLFNVTSTLRINTTTNEIFYCTFRRLDPEENHTAELVIPELPLAHPPNER

SEQ ID NO: 75 - protein, 220 aa, Artificial Sequence
  PD-L1 ECD v20
FTVTVPKDLYVVEYGSNITIECKFPVEKQLDLAALIVYWEKEGKNIIQFVRGEEDLKVQHSSYRQRARLLKDQLSLGIAALQITDVKLQDAGVYRCMISYGGADYKRITVKVNAPYNKINQRILVVDPVTSEHELTCQAEGYPKAEVIWTSSDHQVLSGKTTTTNSKREEKLFNVTSTLRINTTTNEIFYCTFRRLDPEENHTAELVIPELPLAHPPNER

SEQ ID NO: 76 - protein, 220 aa, Artificial Sequence
  PD-L1 ECD v21
FTVTVPKDLYEVEYGSNMTLECKFPVEKQLDLAALTVYWEMEDKDIIQFVHGEEDLKVQRSSYRQRARLLKDQLPLGNAALQITDVKLQDAGVYRCMISYGGADYKRITVKVNAPYNKINQRILVVDPVTSEHELTCQAEGYPKAEVIWTSSDHQVLSGKTTTTNSKREEKLFNVTSTLRINTTTNEIFYCTFRRLDPEENHTAELVIPELPLAHPPNER

SEQ ID NO: 77 - protein, 220 aa, Artificial Sequence
  PD-L1 ECD v22
FTVTVPKDLYVVEYGSNMTIECKFPVEKQLDLDALIVYWEMEDKNIIQFAHGEEDLKVQHSSYRQRARLLKDQLSLGNAALQITDVKLQDAGVYRCMISYGGADYKRITVKVNAPYNKINQRILVVDPVTSEHELTCQAEGYPKAEVIWTSSDHQVLSGKTTTTNSKREEKLFNVTSTLRINTTTNEIFYCTFRRLDPEENHTAELVIPELPLAHPPNER

SEQ ID NO: 78 - protein, 220 aa, Artificial Sequence
  PD-L1 ECD v23
FTVTVPKDLYVVEYGGNMTIECKFPVEKQLDLDALIVYWEMEDKNIIQFVHGEEDLKVQHSSYRQRARLLEDQLPLGNAALQITDVKLQDAGVYRCMISYGGADYKRITVKVNAPYNKINQRILVVDPVTSEHELTCQAEGYPKAEVIWTSSDHQVLSGKTTTTNSKREEKLFNVTSTLRINTTTNEIFYCTFRRLDPEENHTAELVIPELPLAHPPNER

SEQ ID NO: 79 - protein, 220 aa, Artificial Sequence
  PD-L1 ECD v24
FTVTVPKDLYVVEYGSNMTIECKFPVGKQLDLAALIVYWEMEDKTIIQFVHGEEDLKVQHSSYRQRARLLKDQLSLGNAALQITDVKLQDAGVYRCIISYGGADYKRITVKVNAPYNKINQRILVVDPVTSEHELTCQAEGYPKAEVIWTSSDHQVLSGKTTTTNSKREEKLFNVTSTLRINTTTNEIFYCTFRRLDPEENHTAELVIPELPLAHPPNER

SEQ ID NO: 80 - protein, 220 aa, Artificial Sequence
  PD-L1 ECD v25
FTVTVPKDLYVVEYGSNMTIECKFPVGKQLDLAALIVYWEMEDKTIIQFVHGEEDLRVQHSSYRQRARLLKDQLSLGNAALQITDVKLQDAGVYRCMISYGGADYKRITVKVNAPYNKINQRILVVDPVTSEHELTCQAEGYPKAEVIWTSSDHQVLSGKTTTTNSKREEKLFNVTSTLRINTTTNEIFYCTFRRLDPEENHTAELVIPELPLAHPPNER

SEQ ID NO: 81 - protein, 220 aa, Artificial Sequence
  PD-L1 ECD v26
FTVTVPKDLYVVEYGSNMTIECKFPVEKQLDLDALIVYWEMEDKNIIQFVHGVEDLKVQHSSYRQRARLLKDQLSLGNAALQITDVKLQDAGVYRCMISYGGADYKRITVKVNAPYNKINQRILVVDPVTSEHELTCQAEGYPKAEVIWTSSDHQVLSGKTTTTNSKREEKLFNVTSTLRINTTTNEIFYCTFRRLDPEENHTAELVIPELPLAHPPNER

SEQ ID NO: 82 - protein, 220 aa, Artificial Sequence
  PD-L1 ECD v27
FTVTVPKDLYVVEYGSNMTIECKFPVEKQLDLAALIVYWEMEGKDIIQFVHGEEDLKAQHSSYRQRARLLKDQLSLGNAALQITDVKLQDAGVYRCMISYGGADYKRITVKVNAPYNKINQRILVVDPVTSEHELTCQAEGYPKAEVIWTSSDHQVLSGKTTTTNSKREEKLFNVTSTLRINTTTNEIFYCTFRRLDPEENHTAELVIPELPLAHPPNER

SEQ ID NO: 83 - protein, 220 aa, Artificial Sequence
  PD-L1 ECD v28
FTVTVPKDLYVVEYGSNMTIECKFPVEKQLDLAALIVYWGMEVKTIIQFAHGEEDLKVQHSSYRQRARLLKDQLSLGNAALQITDVKLQDAGVYRCMISYGGADYKRITVKVNAPYNKINQRILVVDPVTSEHELTCQAEGYPKAEVIWTSSDHQVLSGKTTTTNSKREEKLFNVTSTLRINTTTNEIFYCTFRRLDPEENHTAELVIPELPLAHPPNER

SEQ ID NO: 84 - protein, 220 aa, Artificial Sequence
  PD-L1 ECD v29
FTVTVPKDLYVVESGSNMTIECKFPVEEQLDLAALIVYWEMEDKTIIQFVHGEEDLKVQHSSYRQRARLLKDQLSLGNAALQITDVKLQDAGVYRCMISYGGADYKRITVKVNAPYNKINQRILVVDPVTSEHELTCQAEGYPKAEVIWTSSDHQVLSGKTTTTNSKREEKLFNVTSTLRINTTTNEIFYCTFRRLDPEENHTAELVIPELPLAHPPNER

SEQ ID NO: 85 - protein, 220 aa, Artificial Sequence
  PD-L1 ECD v30
FTVTVPKDLYVVEYGSNMTIECKFPVEKQLDLDALIVYWEMEDKNIIQFVHGEEDLKVQHSSYRQRARLLKDQLSLGSAALQITDVKLQDAGVYRCMISYGGADYKRITVKVNAPYNKINQRILVVDPVTSEHELTCQAEGYPKAEVIWTSSDHQVLSGKTTTTNSKREEKLFNVTSTLRINTTTNEIFYCTFRRLDPEENHTAELVIPELPLAHPPNER

SEQ ID NO: 86 - protein, 220 aa, Artificial Sequence
  PD-L1 ECD v31
FTVTVPKDLYVVEYGSNMTIECKFPVEKQLDLDALIVYWEMEDKNIIQFVHGEEDLKVQHSSYRQRARLLKDQLSLGIAALQITDVKLQDAGVYRCMISYGGADYKRITVKVNAPYNKINQRILVVDPVTSEHELTCQAEGYPKAEVIWTSSDHQVLSGKTTTTNSKREEKLFNVTSTLRINTTTNEIFYCTFRRLDPEENHTAELVIPELPLAHPPNER

SEQ ID NO: 87 - protein, 220 aa, Artificial Sequence
  PD-L1 ECD v32
FTVTVPKDLYVVEYGSNMTIECKFPVEKQLDLDALIVYWEMEDKTIIQFVHGEEDLKVQHSSYRQRARLLKDQLSLGNAALQITDVKLQDAGVYRCMISYGGADYKRITVKVNAPYNKINQRILVVDPVTSEHELTCQAEGYPKAEVIWTSSDHQVLSGKTTTTNSKREEKLFNVTSTLRINTTTNEIFYCTFRRLDPEENHTAELVIPELPLAHPPNER

SEQ ID NO: 88 - protein, 220 aa, Artificial Sequence
  PD-L1 ECD v33
FTVTVPKDLYVVEYGSNMTIECKFPVEKQLDLDALIVYWEMEDKTIIQFVHGEEDLKVQHSSYRQRARLLKDQLSLGIAALQITDVKLQDAGVYRCMISYGGADYKRITVKVNAPYNKINQRILVVDPVTSEHELTCQAEGYPKAEVIWTSSDHQVLSGKTTTTNSKREEKLFNVTSTLRINTTTNEIFYCTFRRLDPEENHTAELVIPELPLAHPPNER

SEQ ID NO: 89 - protein, 220 aa, Artificial Sequence
  PD-L1 ECD v34
FTVTVPKDLYVVEYGSNMTIECKFPVGKQLDLAALIVYWEMEDKTIIQFAHGEEDLKVQHSSYRQRARLLKDQLSLGNAALQITDVKLQDAGVYRCMISYGGADYKRITVKVNAPYNKINQRILVVDPVTSEHELTCQAEGYPKAEVIWTSSDHQVLSGKTTTTNSKREEKLFNVTSTLRINTTTNEIFYCTFRRLDPEENHTAELVIPELPLAHPPNER

SEQ ID NO: 90 - protein, 220 aa, Artificial Sequence
  PD-L1 ECD v35
FTVTVPKDLYVVEYGSNMTIECKFPVEKQLDLAALIVYWEMEDKTIIQFAHGEEDLKVQHSSYRQRARLLKDQLSLGSAALQITDVKLQDAGVYRCMISYGGADYKRITVKVNAPYNKINQRILVVDPVTSEHELTCQAEGYPKAEVIWTSSDHQVLSGKTTTTNSKREEKLFNVTSTLRINTTTNEIFYCTFRRLDPEENHTAELVIPELPLAHPPNER

SEQ ID NO: 91 - protein, 220 aa, Artificial Sequence
  PD-L1 ECD v36
FTVTVPKDLYVVEYGSNMTLECKFPVEKQLDLAALIVYWEMEDKTIIQFVHGEEDLKVQHSSYRQRARLLKDQLSLGNAALQITDVKLQDAGVYRCMISYGGADYKRITMKVNAPYNKINQRILVVDPVTSEHELTCQAEGYPKAEVIWTSSDHQVLSGKTTTTNSKREEKLFNVTSTLRINTTTNEIFYCTFRRLDPEENHTAELVIPELPLAHPPNER

SEQ ID NO: 92 - protein, 220 aa, Artificial Sequence
  PD-L1 ECD v37
FTVTVPKDLYVVEYGSNMTLECKFPVEKQLDLAALTVYWEMEDKTIIQFAHGEEDLKVQHSSYRQRARLLKDQLSLGNAALQITDVKLQDAGVYRCMISYGGADYKRITVKVNAPYNKINQRILVVDPVTSEHELTCQAEGYPKAEVIWTSSDHQVLSGKTTTTNSKREEKLFNVTSTLRINTTTNEIFYCTFRRLDPEENHTAELVIPELPLAHPPNER

SEQ ID NO: 93 - protein, 220 aa, Artificial Sequence
  PD-L1 ECD v38
FTVTVPKDLYVVEYGSNMTIECKFPVEKQLDLAALIVYWEMEDKTIIQFVHGEEDLKVQHSSYRQRARLLKDQPPLGNAALQITDVKLQDAGVYRCMISYGGADYKRITVKVNAPYNKINQRILVVDPVTSEHELTCQAEGYPKAEVIWTSSDHQVLSGKTTTTNSKREEKLFNVTSTLRINTTTNEIFYCTFRRLDPEENHTAELVIPELPLAHPPNER

SEQ ID NO: 94 - protein, 220 aa, Artificial Sequence
  PD-L1 ECD v39
FTVTVPKDLYVVEYGSNMTIECKFPVEKQLDLAALIVYWEMEDKTIIQFVHGEEDLKVQHSSYRQRARLLKDQLPLGNAALQITDVKLQDAGVYRCMISYGGADYKRITVKVNAPYNKINQRILVVDPVTSEHELTCQAEGYPKAEVIWTSSDHQVLSGKTTTTNSKREEKLFNVTSTLRINTTTNEIFYCTFRRLDPEENHTAELVIPELPLAHPPNER

SEQ ID NO: 95 - protein, 220 aa, Artificial Sequence
  PD-L1 ECD v40
FTVTVPKDLYVVEYGSNMTIECKFPVEKQLDLAALIVYWEMEDKNIIQFVHGEEDLKVQHSSYRQRARLLKDQLPLGNAALQITDVKLQDAGVYRCMISYGGADYRRITVKVNAPYNKINQRILVVDPVTSEHELTCQAEGYPKAEVIWTSSDHQVLSGKTTTTNSKREEKLFNVTSTLRINTTTNEIFYCTFRRLDPEENHTAELVIPELPLAHPPNER

SEQ ID NO: 96 - protein, 220 aa, Artificial Sequence
  PD-L1 ECD v41
FTVTVPKDLYVVEYGSNMTIECKFPVEKQLDLAALIVYWEMEDKNIIQFVHGEEDLKVQHSSYRQRARLLKDQLPLGNAALQITDVKLQDAGVYRCMISYGGADYKRITVKVNAPYNKINQRILVVDPVTSEHELTCQAEGYPKAEVIWTSSDHQVLSGKTTTTNSKREEKLFNVTSTLRINTTTNEIFYCTFRRLDPEENHTAELVIPELPLAHPPNER

SEQ ID NO: 97 - protein, 220 aa, Artificial Sequence
  PD-L1 ECD v42
FTVTVPKDLYVVEYGSNMTIECKFPVEKQLDLDALIVYWEMEDKNIIQFVHGEEDLKVQHSSYRQRARLLKDQLPLGNAALQITDVKLQDAGVYRCVISYGGADYKRITVKVNAPYNKINQRILVVDPVTSEHELTCQAEGYPKAEVIWTSSDHQVLSGKTTTTNSKREEKLFNVTSTLRINTTTNEIFYCTFRRLDPEENHTAELVIPELPLAHPPNER

SEQ ID NO: 98 - protein, 220 aa, Artificial Sequence
  PD-L1 ECD v43
FTVTVPKDLYVVEYGSNMTIECKFPVEKQLDLDALIVYWEMEDKNIIQFVHGEEDLKVQHSSYRQRARLLKDQLPLGNAALQITDVKLQDAGVYRCMISYGGAGYKRITVKVNAPYNKINQRILVVDPVTSEHELTCQAEGYPKAEVIWTSSDHQVLSGKTTTTNSKREEKLFNVTSTLRINTTTNEIFYCTFRRLDPEENHTAELVIPELPLAHPPNER

SEQ ID NO: 99 - protein, 220 aa, Artificial Sequence
  PD-L1 ECD v44
FTVTVPKDLYVVEYGSNMTIECKFPVEKQLDLDALIVYWEMEDKNIIQFVHGEEDLKVQHSSYRQRARLLKDQLPLGNAALQITDVKLQDAGVYRCMISYGGADYKRITVKVNAPYNKINQRILVVDPVTSEHELTCQAEGYPKAEVIWTSSDHQVLSGKTTTTNSKREEKLFNVTSTLRINTTTNEIFYCTFRRLDPEENHTAELVIPELPLAHPPNER

SEQ ID NO: 100 - protein, 220 aa, Artificial Sequence
  PD-L1 ECD v45
FTVTVPKDLYVVEYGSNMTLECKFPVGKQLDLAALIVYWEMEDKTIIQFAHGEEDLKVQHSSYRQRARLLKDQLSLGNAALQITDVKLQDAGVYRCMISYGGADYKRITVKVNAPYNKINQRILVVDPVTSEHELTCQAEGYPKAEVIWTSSDHQVLSGKTTTTNSKREEKLFNVTSTLRINTTTNEIFYCTFRRLDPEENHTAELVIPELPLAHPPNER

SEQ ID NO: 101 - protein, 220 aa, Artificial Sequence
  PD-L1 ECD v46
FTVTVPKDLYVVEYGSNMTLECKFPVGKQLDLAALIVYWEMEGKDIIQFVHGEEDLKAQHSSYRQRARLLKDQLSLGIAALQITDVKLQDAGVYRCMISYGGADYKRITVKVNAPYNKINQRILVVDPVTSEHELTCQAEGYPKAEVIWTSSDHQVLSGKTTTTNSKREEKLFNVTSTLRINTTTNEIFYCTFRRLDPEENHTAELVIPELPLAHPPNER

SEQ ID NO: 102 - protein, 220 aa, Artificial Sequence
  PD-L1 ECD v47
FTVTVPKDLYVVEYGSNMTLECKFPVEKQLDLAALIVYWEMEGKDIIQFVHGEEDLKAQHSSYRQRARLLKDQLSLGIAALQITDVKLQDAGVYRCMISYGGADYKRITVKVNAPYNKINQRILVVDPVTSEHELTCQAEGYPKAEVIWTSSDHQVLSGKTTTTNSKREEKLFNVTSTLRINTTTNEIFYCTFRRLDPEENHTAELVIPELPLAHPPNER

SEQ ID NO: 103 - protein, 220 aa, Artificial Sequence
  PD-L1 ECD v48
FTVTVPKDLYVVEYGSNMTLECKFPVEKQLDLDALIVYWEMEGKDIIQFVHGEEDLKAQHSSYRQRARLLKDQLSLGIAALQITDVKLQDAGVYRCMISYGGADYKRITVKVNAPYNKINQRILVVDPVTSEHELTCQAEGYPKAEVIWTSSDHQVLSGKTTTTNSKREEKLFNVTSTLRINTTTNEIFYCTFRRLDPEENHTAELVIPELPLAHPPNER

SEQ ID NO: 104 - protein, 220 aa, Artificial Sequence
  PD-L1 ECD v49
FTVTVPKDLYVVEYGSNMTLECKFPVEKQLDLAALIVYWEMEGKDIIQFVHGEEDLKVQHSSYRQRARLLKDQLSLGIAALQITDVKLQDAGVYRCMISYGGADYKRITVKVNAPYNKINQRILVVDPVTSEHELTCQAEGYPKAEVIWTSSDHQVLSGKTTTTNSKREEKLFNVTSTLRINTTTNEIFYCTFRRLDPEENHTAELVIPELPLAHPPNER

SEQ ID NO: 105 - protein, 220 aa, Artificial Sequence
  PD-L1 ECD v50
FTVTVPKDLYVVEYGSNMTIECKFPVGKQLDLAALIVYWEMEDKTIIQFAHGEEDLKVQHSSYRQRARLLKDQLSLGIAALQITDVKLQDAGVYRCMISYGGADYKRITVKVNAPYNKINQRILVVDPVTSEHELTCQAEGYPKAEVIWTSSDHQVLSGKTTTTNSKREEKLFNVTSTLRINTTTNEIFYCTFRRLDPEENHTAELVIPELPLAHPPNER

SEQ ID NO: 106 - protein, 220 aa, Artificial Sequence
  PD-L1 ECD v51
FTVTVPKDLYVVEYGSNMTIECKFPVEKQLDLAALIVYWEMEDKTIIQFAHGEEDLKVQHSSYRQRARLLKDQLSLGIAALQITDVKLQDAGVYRCMISYGGADYKRITVKVNAPYNKINQRILVVDPVTSEHELTCQAEGYPKAEVIWTSSDHQVLSGKTTTTNSKREEKLFNVTSTLRINTTTNEIFYCTFRRLDPEENHTAELVIPELPLAHPPNER

SEQ ID NO: 107 - protein, 220 aa, Artificial Sequence
  PD-L1 ECD v52
FTVTVPKDLYAVEYGSNMTLECKFPVGKQLDLAALIVYWEMEGKDIIQFVYGEEDLKVQHSSYRQRARLLKDQLSLGNAALQITDVKLQDAGVYRCMIGYGGADYKRITVKVNAPYNKINQRILVVDPVTSEHELTCQAEGYPKAEVIWTSSDHQVLSGKTTTTNSKREEKLFNVTSTLRINTTTNEIFYCTFRRLDPEENHTAELVIPELPLAHPPNER

SEQ ID NO: 108 - protein, 220 aa, Artificial Sequence
  PD-L1 ECD v53
FTVTVPKDLYVVEYGSNMTLECKFPVGKQLDLAALIVYWEMEGKTIIQFAHGEEDLKVQHSSYRQRARLLKDQLSLGNAALQITDVKLQDAGVYRCMISYGGADYKRITVKVNAPYNKINQRILVVDPVTSEHELTCQAEGYPKAEVIWTSSDHQVLSGKTTTTNSKREEKLFNVTSTLRINTTTNEIFYCTFRRLDPEENHTAELVIPELPLAHPPNER

SEQ ID NO: 109 - protein, 220 aa, Artificial Sequence
  PD-L1 ECD v54
FTVTVPKDLYVVEYGSNMTLECKFPVEEQLDLAALIVYWEMEGKDIIQFVHGEEDLKAQHSSYRQRARLLKDQLSLGNAALQITDVKLRDAGVYRCMISYGGADYKRITVKVNAPYNKINQRILVVDPVTSEHELTCQAEGYPKAEVIWTSSDHQVLSGKTTTTNSKREEKLFNVTSTLRINTTTNEIFYCTFRRLDPEENHTAELVIPELPLAHPPNER

SEQ ID NO: 110 - protein, 220 aa, Artificial Sequence; identical to SEQ ID NO: 66
  PD-L1 ECD v55

SEQ ID NO: 111 - protein, 220 aa, Artificial Sequence
  PD-L1 ECD v56
FTVTVPKDLYVVEYGSNMTLECKFPVEEQLDLAALIVYWEMEGKDIIQFVHGGEDLKAQHSSYRQRARLLKDQLSLGIAALQITDVKLQDAGVYRCMISYGGADYKRITVKVNAPYNKINQRILVVDPVTSEHELTCQAEGYPKAEVIWTSSDHQVLSGKTTTTNSKREEKLFNVTSTLRINTTTNEIFYCTFRRLDPEENHTAELVIPELPLAHPPNER

SEQ ID NO: 112 - protein, 220 aa, Artificial Sequence
  PD-L1 ECD v57
FTVTVPKDLYVVEYGSNMTIECKFPVEKQLDLDALIVYWEMEGKDIIQFVHGEEDLKAQHSSYRQRARLLKDQLPLGNAALQITDVKLQDAGVYRCMISYGGADYKRITVKVNAPYNKINQRILVVDPVTSEHELTCQAEGYPKAEVIWTSSDHQVLSGKTTTTNSKREEKLFNVTSTLRINTTTNEIFYCTFRRLDPEENHTAELVIPELPLAHPPNER

SEQ ID NO: 113 - protein, 220 aa, Artificial Sequence
  PD-L1 ECD v58
FTVTVPKDLYVVEYGSNMTIECRFPVEKQLDLAALIVYWEMEGKDIIQFVHGEEDLKVQHSSYRQRARLLKDQLSLGNAALQITDVKLQDAGVYRCMISYGGADYKRITVKVNAPYNKINQRILVVDPVTSEHELTCQAEGYPKAEVIWTSSDHQVLSGKTTTTNSKREEKLFNVTSTLRINTTTNEIFYCTFRRLDPEENHTAELVIPELPLAHPPNER

SEQ ID NO: 114 - protein, 220 aa, Artificial Sequence
  PD-L1 ECD v59
FTVTVPKDLYVVEYGSNMTLECKFPVEKQLDLAALIVYWEMEGKDIIQFVHGEEDLKAQHSSYRQRARLLKDQLSLGIAALQITDVKLQGAGVYRCMISYDGADYKRITVKVNAPYNKINQRILVVDPVTSEHELTCQAEGYPKAEVIWTSSDHQVLSGKTTTTNSKREEKLFNVTSTLRINTTTNEIFYCTFRRLDPEENHTAELVIPELPLAHPPNER

SEQ ID NO: 115 - protein, 221 aa, Artificial Sequence
  PD-L1 ECD v60
FTVTVPKDLYVVEYGSNMTIECKFPVEKQLDLAALIVYWEMEGKDIIQFVHGEEDQKAQHSSYRQRARLLKDQLSLGNAALQITDVKLQDAGVYRCMISYGGGADYKRITVKVNAPYNKINQRILVVDPVTSEHELTCQAEGYPKAEVIWTSSDHQVLSGKTTTTNSKREEKLFNVTSTLRINTTTNEIFYCTFRRLDPEENHTAELVIPELPLAHPPNER

SEQ ID NO: 116 - protein, 220 aa, Artificial Sequence
  PD-L1 ECD v61
FTVTVPKDLYVVEYGSNMTLECEFPVEKQLDLAALIVYWEMEGKDIIQFVHGEEDLKAQHSSYRQRARLLKDQLSLGIAALQITDVKLQDAGVYRCMISYGGADYKRITVKVNAPYNKINQRILVVDPVTSEHELTCQAEGYPKAEVIWTSSDHQVLSGKTTTTNSKREEKLFNVTSTLRINTTTNEIFYCTFRRLDPEENHTAELVIPELPLAHPPNER

SEQ ID NO: 117 - protein, 220 aa, Artificial Sequence
  PD-L1 ECD v62
FTVTVPKDLYVVEYGSNMTLECEFPVEKQLDLAALIVYWEMEGKDIIQFAHGEEDLKVQHSSYRQRARLLKDQLSLGIAALQITDVKLQDAGVYRCMISYGGADYKRITVKVNAPYNKINQRILVVDPVTSEHELTCQAEGYPKAEVIWTSSDHQVLSGKTTTTNSKREEKLFNVTSTLRINTTTNEIFYCTFRRLDPEENHTAELVIPELPLAHPPNER

SEQ ID NO: 118 - protein, 220 aa, Artificial Sequence
  PD-L1 ECD v63
FTVTVPKDLYVVEYGSNMIIECKFPVGKQLDLAALIVYWEMEDKIIIQFAHGEEDLKVQHSSYRQRARLLKDQLSLGIAALQITDVKLQDAGVYRCKISYGGADYKRITVKVNAPYNKINQRILVVDPVTSEHELTCQAEGYPKAEVIWTSSDHQVLSGKTTTTNSKREEKLFNVTSTLRINTTTNEIFYCTFRRLDPEENHTAELVIPELPLAHPPNER

SEQ ID NO: 119 - protein, 220 aa, Artificial Sequence
  PD-L1 ECD v64
FTVTVPKDLYVVEYGSNMTLECKFPVEKQLDLAALIVYWEKEGKDIIQFVHGEEDLKVQHSSYRQRARLLKDQLSLGNAALQITDVKLQDAGVYRCMISYGGADYKRITVKVNAPYNKINQRILVVDPVTSEHELTCQAEGYPKAEVIWTSSDHQVLSGKTTTTNSKREEKLFNVTSTLRINTTTNEIFYCTFRRLDPEENHTAELVIPELPLAHPPNER

SEQ ID NO: 120 - protein, 220 aa, Artificial Sequence
  PD-L1 ECD v65
FTVTVPKDLYVVEYGSNMTIECRFPVEKQLDLAALIVYWEMEDKTIIQFVHGEEDLKVQHSSYRQRARLLKDQLSLGIAALQITDVKLQDAGVYRCMISYGGADYKRITVKVNAPYNKINQRILVVDPVTSEHELTCQAEGYPKAEVIWTSSDHQVLSGKTTTTNSKREEKLFNVTSTLRINTTTNEIFYCTFRRLDPEENHTAELVIPELPLAHPPNER

SEQ ID NO: 121 - protein, 107 aa, Artificial Sequence
  PD-L1 IgV v1
PKDLYVVEYGSNMTIECKFPVENQLDLAALIVYWEVEDKTIIQFVNGEEDLEVQHSSYRQRARLLKDQLSLGNAALQITDVKLQDAGVYRCMISYGGADYKRITVKV

SEQ ID NO: 122 - protein, 107 aa, Artificial Sequence
  PD-L1 IgV v2
PKDLYVVEYGSNMTLECKFPVEKQLDLAALTVYWEMEDKDITQFVHGEEDLKVQHSSYRQRARLLKDQLSLGNAALQITDVKLQDAGVYRCMISYGGADYKRITVKV

SEQ ID NO: 123 - protein, 107 aa, Artificial Sequence
  PD-L1 IgV v3
PKDLYVVEYGSNMTLECKFPVEKQLDLAALIVYWEKEDENIIQFVHGEEDLKVQHSSYRQRARLLKDQLSLGNAALQITDVKLQDAGVYRCMISYGGADYKRITVKV

SEQ ID NO: 124 - protein, 107 aa, Artificial Sequence
  PD-L1 IgV v4
SKDLYVVEYGSNMTIECKFPVEKQLDLAALIVYWEMEDKTIIQFVHGEEDLKVQHSSYRQRARLLKDQLSLGIAALQTTDVKLQDAGVYRCMISYGGADYKRITVKV

SEQ ID NO: 125 - protein, 107 aa, Artificial Sequence
  PD-L1 IgV v5
PKDLYVVEYGSNMTIECKFPVEKQLDLAALIVYWEMEDKNIIQFVHGEEDLKVQHSSYRQRARLLKDQLSLGIAALQITDVKLQDAGVYRCMISYGGADYKRITVKV

SEQ ID NO: 126 - protein, 107 aa, Artificial Sequence
  PD-L1 IgV v6
PKDLYVVEYGSNMTIECKFPVEKQLDLAALIVYWEKEDKNIIQFVHGEEDLKVQHSSYRQRARLLKDQLSLGIAALQITDVKLQDAGVYRCMISYGGADYKRITVKV

SEQ ID NO: 127 - protein, 107 aa, Artificial Sequence
  PD-L1 IgV v7
PKDLYVVEYGSNMTIECKFPVEKQLDLAALIVYWEMEDKTIIQFVHGEEDLKVQHSSYRQRARLLKDQLSLGIAALQITDVKLQDAGVYRCMISYGGADYKRITVKV

SEQ ID NO: 128 - protein, 107 aa, Artificial Sequence
  PD-L1 IgV v8
PKDLYVVEYGSNMTLECKFPVEKQLDLAALIVYWEMEDKTIIQFVHGEEDLKVQHSSYRQRARLLKDQLSLGNAALQITDVKLQDAGVYRCMISYGGADYKRITVKV

SEQ ID NO: 129 - protein, 107 aa, Artificial Sequence
  PD-L1 IgV v9
PKDLYVVEYGSNMTIECKFPVEKQLDLAALIVYWEMEDKTIIQFVHGEEDLKVQHSSYRQRARLLKDQLSLGNAALQITDVKLQDAGVYRCMISYGGADYKRITVKV

SEQ ID NO: 130 - protein, 107 aa, Artificial Sequence
  PD-L1 IgV v10
PKDLYVVEYGSNMTIECKFPVEKQLDLAALIVYWEKEDKNIIQFVHGEEDLKVQHSSYRQRARLLKDQLSLGNAALQITDVKLQDAGVYRCMISYGGADYKRITVKV

SEQ ID NO: 131 - protein, 107 aa, Artificial Sequence
  PD-L1 IgV v11
PKDLYVVEYGSNMTLECKFPVEKQLDLAALTVYWEMEDKDIIQFVHGEEDLKVQHSSYRQRARLLKDQLSLGNAALQITDVKLQDAGVYRCMISYGGADYKRITVKV

SEQ ID NO: 132 - protein, 107 aa, Artificial Sequence
  PD-L1 IgV v12
PKDLYVVEYGSDMTIECKFPVEKQLDLAALIVYWEMEDKTIIQFAHGEEDLKVQHSSYRQRARLLKGQLSLGNAALQITDVKLQDAGVYRCMISYGGADYKRITVKV

SEQ ID NO: 133 - protein, 107 aa, Artificial Sequence
  PD-L1 IgV v13
PKDLYVVEYGSNMTLECKFPVEKQLDLAALIVYWEMEDKNIIQSVHGEEDLKVQHSSYRQRARLLKDQLSLGNAALQITDVKLQDAGVYRCMISYGGADYKRITVKV

SEQ ID NO: 134 - protein, 107 aa, Artificial Sequence
  PD-L1 IgV v14
PKDLYVVEYGSNMTIECKFPVEKQLDLAALIVYWEMEDKTIIQFAHGEEDLKVQHSSYRQRARLLKDQLSLGNAALQITDVKLQDAGVYRCMISYGGADYKRITVKV

SEQ ID NO: 135 - protein, 107 aa, Artificial Sequence
  PD-L1 IgV v15
PKDLYVVEYGSNMTLECKFPVEKQLDLAALIVYWEMEDKTIIQFVHGEEDLKVQHSSYRQRARLLKDQLSLGIAALQITDVKLQDAGVYRCMISYGGADYKRITVKV

SEQ ID NO: 136 - protein, 107 aa, Artificial Sequence
  PD-L1 IgV v16
PKDLYVVEYGSNMTLECKFPVEKQLDLAALIVYWEMEDKTIIQFAHGEEDLKVQHSSYRQRARLLKDQLSLGNAALQITDVKLQDAGVYRCMISYGGADYKRITVKV

SEQ ID NO: 137 - protein, 107 aa, Artificial Sequence
  PD-L1 IgV v17
PKDLYVVEYGSNMTIECKFPVEKQLDLAALIVYWEVEDKTIIQFVHGEEDLKVQHSSYRQRARLLKDQLSLGNAALQITDVKLQDAGVYRCMISYGGADYKRITVKV

SEQ ID NO: 138 - protein, 107 aa, Artificial Sequence
  PD-L1 IgV v18
PKDLYVVEYGSNMTIECKFPVEKQLDLAALIVYWEKEDKTIIQFVHGEEDLKVQHSSYRQRARLLKDQLSLGNAALQITDVKLQDAGVYRCMISYGGADYKRITVKV

SEQ ID NO: 139 - protein, 107 aa, Artificial Sequence
  PD-L1 IgV v19
PKDLYVVEYGSNMTIECKFPVEKQLDLDALIVYWEMEDKNIIQFVHGEEDLKVQHSSYRQRARLLKDQLPLGNAALQITEVKLQDAGVYRCMISYGGADYKRITVKV

SEQ ID NO: 140 - protein, 107 aa, Artificial Sequence
  PD-L1 IgV v20
PKDLYVVEYGSNITIECKFPVEKQLDLAALIVYWEKEGKNIIQFVRGEEDLKVQHSSYRQRARLLKDQLSLGIAALQITDVKLQDAGVYRCMISYGGADYKRITVKV

SEQ ID NO: 141 - protein, 107 aa, Artificial Sequence
  PD-L1 IgV v21
PKDLYEVEYGSNMTLECKFPVEKQLDLAALTVYWEMEDKDIIQFVHGEEDLKVQRSSYRQRARLLKDQLPLGNAALQITDVKLQDAGVYRCMISYGGADYKRITVKV

SEQ ID NO: 142 - protein, 107 aa, Artificial Sequence
  PD-L1 IgV v22
PKDLYVVEYGSNMTIECKFPVEKQLDLDALIVYWEMEDKNIIQFAHGEEDLKVQHSSYRQRARLLKDQLSLGNAALQITDVKLQDAGVYRCMISYGGADYKRITVKV

SEQ ID NO: 143 - protein, 107 aa, Artificial Sequence
  PD-L1 IgV v23
PKDLYVVEYGGNMTIECKFPVEKQLDLDALIVYWEMEDKNIIQFVHGEEDLKVQHSSYRQRARLLEDQLPLGNAALQITDVKLQDAGVYRCMISYGGADYKRITVKV

SEQ ID NO: 144 - protein, 107 aa, Artificial Sequence
  PD-L1 IgV v24
PKDLYVVEYGSNMTIECKFPVGKQLDLAALIVYWEMEDKTIIQFVHGEEDLKVQHSSYRQRARLLKDQLSLGNAALQITDVKLQDAGVYRCIISYGGADYKRITVKV

SEQ ID NO: 145 - protein, 107 aa, Artificial Sequence
  PD-L1 IgV v25
PKDLYVVEYGSNMTIECKFPVGKQLDLAALIVYWEMEDKTIIQFVHGEEDLRVQHSSYRQRARLLKDQLSLGNAALQITDVKLQDAGVYRCMISYGGADYKRITVKV

SEQ ID NO: 146 - protein, 107 aa, Artificial Sequence
  PD-L1 IgV v26
PKDLYVVEYGSNMTIECKFPVEKQLDLDALIVYWEMEDKNIIQFVHGVEDLKVQHSSYRQRARLLKDQLSLGNAALQITDVKLQDAGVYRCMISYGGADYKRITVKV

SEQ ID NO: 147 - protein, 107 aa, Artificial Sequence
  PD-L1 IgV v27
PKDLYVVEYGSNMTIECKFPVEKQLDLAALIVYWEMEGKDIIQFVHGEEDLKAQHSSYRQRARLLKDQLSLGNAALQITDVKLQDAGVYRCMISYGGADYKRITVKV

SEQ ID NO: 148 - protein, 107 aa, Artificial Sequence
  PD-L1 IgV v28
PKDLYVVEYGSNMTIECKFPVEKQLDLAALIVYWGMEVKTIIQFAHGEEDLKVQHSSYRQRARLLKDQLSLGNAALQITDVKLQDAGVYRCMISYGGADYKRITVKV

SEQ ID NO: 149 - protein, 107 aa, Artificial Sequence
  PD-L1 IgV v29
PKDLYVVESGSNMTIECKFPVEEQLDLAALIVYWEMEDKTIIQFVHGEEDLKVQHSSYRQRARLLKDQLSLGNAALQITDVKLQDAGVYRCMISYGGADYKRITVKV

SEQ ID NO: 150 - protein, 107 aa, Artificial Sequence
  PD-L1 IgV v30
PKDLYVVEYGSNMTIECKFPVEKQLDLDALIVYWEMEDKNIIQFVHGEEDLKVQHSSYRQRARLLKDQLSLGSAALQITDVKLQDAGVYRCMISYGGADYKRITVKV

SEQ ID NO: 151 - protein, 107 aa, Artificial Sequence
  PD-L1 IgV v31
PKDLYVVEYGSNMTIECKFPVEKQLDLDALIVYWEMEDKNIIQFVHGEEDLKVQHSSYRQRARLLKDQLSLGIAALQITDVKLQDAGVYRCMISYGGADYKRITVKV

SEQ ID NO: 152 - protein, 107 aa, Artificial Sequence
  PD-L1 IgV v32
PKDLYVVEYGSNMTIECKFPVEKQLDLDALIVYWEMEDKTIIQFVHGEEDLKVQHSSYRQRARLLKDQLSLGNAALQITDVKLQDAGVYRCMISYGGADYKRITVKV

SEQ ID NO: 153 - protein, 107 aa, Artificial Sequence
  PD-L1 IgV v33
PKDLYVVEYGSNMTIECKFPVEKQLDLDALIVYWEMEDKTIIQFVHGEEDLKVQHSSYRQRARLLKDQLSLGIAALQITDVKLQDAGVYRCMISYGGADYKRITVKV

SEQ ID NO: 154 - protein, 107 aa, Artificial Sequence
  PD-L1 IgV v34
PKDLYVVEYGSNMTIECKFPVGKQLDLAALIVYWEMEDKTIIQFAHGEEDLKVQHSSYRQRARLLKDQLSLGNAALQITDVKLQDAGVYRCMISYGGADYKRITVKV

SEQ ID NO: 155 - protein, 107 aa, Artificial Sequence
  PD-L1 IgV v35
PKDLYVVEYGSNMTIECKFPVEKQLDLAALIVYWEMEDKTIIQFAHGEEDLKVQHSSYRQRARLLKDQLSLGSAALQITDVKLQDAGVYRCMISYGGADYKRITVKV

SEQ ID NO: 156 - protein, 107 aa, Artificial Sequence
  PD-L1 IgV v36
PKDLYVVEYGSNMTLECKFPVEKQLDLAALIVYWEMEDKTIIQFVHGEEDLKVQHSSYRQRARLLKDQLSLGNAALQITDVKLQDAGVYRCMISYGGADYKRITMKV

SEQ ID NO: 157 - protein, 107 aa, Artificial Sequence
  PD-L1 IgV v37
PKDLYVVEYGSNMTLECKFPVEKQLDLAALTVYWEMEDKTIIQFAHGEEDLKVQHSSYRQRARLLKDQLSLGNAALQITDVKLQDAGVYRCMISYGGADYKRITVKV

SEQ ID NO: 158 - protein, 107 aa, Artificial Sequence
  PD-L1 IgV v38
PKDLYVVEYGSNMTIECKFPVEKQLDLAALIVYWEMEDKTIIQFVHGEEDLKVQHSSYRQRARLLKDQPPLGNAALQITDVKLQDAGVYRCMISYGGADYKRITVKV

SEQ ID NO: 159 - protein, 107 aa, Artificial Sequence
  PD-L1 IgV v39
PKDLYVVEYGSNMTIECKFPVEKQLDLAALIVYWEMEDKTIIQFVHGEEDLKVQHSSYRQRARLLKDQLPLGNAALQITDVKLQDAGVYRCMISYGGADYKRITVKV

SEQ ID NO: 160 - protein, 107 aa, Artificial Sequence
  PD-L1 IgV v40
PKDLYVVEYGSNMTIECKFPVEKQLDLAALIVYWEMEDKNIIQFVHGEEDLKVQHSSYRQRARLLKDQLPLGNAALQITDVKLQDAGVYRCMISYGGADYRRITVKV

SEQ ID NO: 161 - protein, 107 aa, Artificial Sequence
  PD-L1 IgV v41
PKDLYVVEYGSNMTIECKFPVEKQLDLAALIVYWEMEDKNIIQFVHGEEDLKVQHSSYRQRARLLKDQLPLGNAALQITDVKLQDAGVYRCMISYGGADYKRITVKV

SEQ ID NO: 162 - protein, 107 aa, Artificial Sequence
  PD-L1 IgV v42
PKDLYVVEYGSNMTIECKFPVEKQLDLDALIVYWEMEDKNIIQFVHGEEDLKVQHSSYRQRARLLKDQLPLGNAALQITDVKLQDAGVYRCVISYGGADYKRITVKV

SEQ ID NO: 163 - protein, 107 aa, Artificial Sequence
  PD-L1 IgV v43
PKDLYVVEYGSNMTIECKFPVEKQLDLDALIVYWEMEDKNIIQFVHGEEDLKVQHSSYRQRARLLKDQLPLGNAALQITDVKLQDAGVYRCMISYGGAGYKRITVKV

SEQ ID NO: 164 - protein, 107 aa, Artificial Sequence
  PD-L1 IgV v44
PKDLYVVEYGSNMTIECKFPVEKQLDLDALIVYWEMEDKNIIQFVHGEEDLKVQHSSYRQRARLLKDQLPLGNAALQITDVKLQDAGVYRCMISYGGADYKRITVKV

SEQ ID NO: 165 - protein, 107 aa, Artificial Sequence
  PD-L1 IgV v45
PKDLYVVEYGSNMTLECKFPVGKQLDLAALIVYWEMEDKTIIQFAHGEEDLKVQHSSYRQRARLLKDQLSLGNAALQITDVKLQDAGVYRCMISYGGADYKRITVKV

SEQ ID NO: 166 - protein, 107 aa, Artificial Sequence
  PD-L1 IgV v46
PKDLYVVEYGSNMTLECKFPVGKQLDLAALIVYWEMEGKDIIQFVHGEEDLKAQHSSYRQRARLLKDQLSLGIAALQITDVKLQDAGVYRCMISYGGADYKRITVKV

SEQ ID NO: 167 - protein, 107 aa, Artificial Sequence
  PD-L1 IgV v47
PKDLYVVEYGSNMTLECKFPVEKQLDLAALIVYWEMEGKDIIQFVHGEEDLKAQHSSYRQRARLLKDQLSLGIAALQITDVKLQDAGVYRCMISYGGADYKRITVKV

SEQ ID NO: 168 - protein, 107 aa, Artificial Sequence
  PD-L1 IgV v48
PKDLYVVEYGSNMTLECKFPVEKQLDLDALIVYWEMEGKDIIQFVHGEEDLKAQHSSYRQRARLLKDQLSLGIAALQITDVKLQDAGVYRCMISYGGADYKRITVKV

SEQ ID NO: 169 - protein, 107 aa, Artificial Sequence
  PD-L1 IgV v49
PKDLYVVEYGSNMTLECKFPVEKQLDLAALIVYWEMEGKDIIQFVHGEEDLKVQHSSYRQRARLLKDQLSLGIAALQITDVKLQDAGVYRCMISYGGADYKRITVKV

SEQ ID NO: 170 - protein, 107 aa, Artificial Sequence
  PD-L1 IgV v50
PKDLYVVEYGSNMTIECKFPVGKQLDLAALIVYWEMEDKTIIQFAHGEEDLKVQHSSYRQRARLLKDQLSLGIAALQITDVKLQDAGVYRCMISYGGADYKRITVKV

SEQ ID NO: 171 - protein, 107 aa, Artificial Sequence
  PD-L1 IgV v51
PKDLYVVEYGSNMTIECKFPVEKQLDLAALIVYWEMEDKTIIQFAHGEEDLKVQHSSYRQRARLLKDQLSLGIAALQITDVKLQDAGVYRCMISYGGADYKRITVKV

SEQ ID NO: 172 - protein, 107 aa, Artificial Sequence
  PD-L1 IgV v52
PKDLYAVEYGSNMTLECKFPVGKQLDLAALIVYWEMEGKDIIQFVYGEEDLKVQHSSYRQRARLLKDQLSLGNAALQITDVKLQDAGVYRCMIGYGGADYKRITVKV

SEQ ID NO: 173 - protein, 107 aa, Artificial Sequence
  PD-L1 IgV v53
PKDLYVVEYGSNMTLECKFPVGKQLDLAALIVYWEMEGKTIIQFAHGEEDLKVQHSSYRQRARLLKDQLSLGNAALQITDVKLQDAGVYRCMISYGGADYKRITVKV

SEQ ID NO: 174 - protein, 107 aa, Artificial Sequence
  PD-L1 IgV v54
PKDLYVVEYGSNMTLECKFPVEEQLDLAALIVYWEMEGKDIIQFVHGEEDLKAQHSSYRQRARLLKDQLSLGNAALQITDVKLRDAGVYRCMISYGGADYKRITVKV

SEQ ID NO: 175 - protein, 107 aa, Artificial Sequence; identical to SEQ ID NO: 131
  PD-L1 IgV v55

SEQ ID NO: 176 - protein, 107 aa, Artificial Sequence
  PD-L1 IgV v56
PKDLYVVEYGSNMTLECKFPVEEQLDLAALIVYWEMEGKDIIQFVHGGEDLKAQHSSYRQRARLLKDQLSLGIAALQITDVKLQDAGVYRCMISYGGADYKRITVKV

SEQ ID NO: 177 - protein, 107 aa, Artificial Sequence
  PD-L1 IgV v57
PKDLYVVEYGSNMTIECKFPVEKQLDLDALIVYWEMEGKDIIQFVHGEEDLKAQHSSYRQRARLLKDQLPLGNAALQITDVKLQDAGVYRCMISYGGADYKRITVKV

SEQ ID NO: 178 - protein, 107 aa, Artificial Sequence
  PD-L1 IgV v58
PKDLYVVEYGSNMTIECRFPVEKQLDLAALIVYWEMEGKDIIQFVHGEEDLKVQHSSYRQRARLLKDQLSLGNAALQITDVKLQDAGVYRCMISYGGADYKRITVKV

SEQ ID NO: 179 - protein, 107 aa, Artificial Sequence
  PD-L1 IgV v59
PKDLYVVEYGSNMTLECKFPVEKQLDLAALIVYWEMEGKDIIQFVHGEEDLKAQHSSYRQRARLLKDQLSLGIAALQITDVKLQGAGVYRCMISYDGADYKRITVKV

SEQ ID NO: 180 - protein, 108 aa, Artificial Sequence
  PD-L1 IgV v60
PKDLYVVEYGSNMTIECKFPVEKQLDLAALIVYWEMEGKDIIQFVHGEEDQKAQHSSYRQRARLLKDQLSLGNAALQITDVKLQDAGVYRCMISYGGGADYKRITVKV

SEQ ID NO: 181 - protein, 107 aa, Artificial Sequence
  PD-L1 IgV v61
PKDLYVVEYGSNMTLECEFPVEKQLDLAALIVYWEMEGKDIIQFVHGEEDLKAQHSSYRQRARLLKDQLSLGIAALQITDVKLQDAGVYRCMISYGGADYKRITVKV

SEQ ID NO: 182 - protein, 107 aa, Artificial Sequence
  PD-L1 IgV v62
PKDLYVVEYGSNMTLECEFPVEKQLDLAALIVYWEMEGKDIIQFAHGEEDLKVQHSSYRQRARLLKDQLSLGIAALQITDVKLQDAGVYRCMISYGGADYKRITVKV

SEQ ID NO: 183 - protein, 107 aa, Artificial Sequence
  PD-L1 IgV v63
PKDLYVVEYGSNMIIECKFPVGKQLDLAALIVYWEMEDKIIIQFAHGEEDLKVQHSSYRQRARLLKDQLSLGIAALQITDVKLQDAGVYRCKISYGGADYKRITVKV

SEQ ID NO: 184 - protein, 107 aa, Artificial Sequence
  PD-L1 IgV v64
PKDLYVVEYGSNMTLECKFPVEKQLDLAALIVYWEKEGKDIIQFVHGEEDLKVQHSSYRQRARLLKDQLSLGNAALQITDVKLQDAGVYRCMISYGGADYKRITVKV

SEQ ID NO: 185 - protein, 107 aa, Artificial Sequence
  PD-L1 IgV v65
PKDLYVVEYGSNMTIECRFPVEKQLDLAALIVYWEMEDKTIIQFVHGEEDLKVQHSSYRQRARLLKDQLSLGIAALQITDVKLQDAGVYRCMISYGGADYKRITVKV

SEQ ID NO: 186 - protein, 19 aa, Artificial Sequence
  VH signal peptide
MGSTAILALLLAVLQGVSA

SEQ ID NO: 187 - protein, 232 aa, Artificial Sequence
  IgG1 Fc
EPKSCDKTHTCPPCPAPELLGGPSVFLFPPKPKDTLMISRTPEVTCVVVDVSHEDPEVKFNWYVDGVEVHNAKTKPREEQYNSTYRVVSVLTVLHQDWLNGKEYKCKVSNKALPAPIEKTISKAKGQPREPQVYTLPPSREEMTKNQVSLTCLVKGFYPSDIAVEWESNGQPENNYKTTPPVLDSDGSFFLYSKLTVDKSRWQQGNVFSCSVMHEALHNHYTQKSLSLSPGK

SEQ ID NO: 188 - protein, 235 aa, Artificial Sequence
  IgG2 Fc
TKVDKTVERKCCVECPPCPAPPVAGPSVFLFPPKPKDTLMISRTPEVTCVVVDVSHEDPEVQFNWYVDGVEVHNAKTKPREEQFNSTFRVVSVLTVVHQDWLNGKEYKCKVSNKGLPAPIEKTISKTKGQPREPQVYTLPPSREEMTKNQVSLTCLVKGFYPSDIAVEWESNGQPENNYKTTPPMLDSDGSFFLYSKLTVDKSRWQQGNVFSCSVMHEALHNHYTQKSLSLSPGK

SEQ ID NO: 189 - protein, 254 aa, Homo sapiens
  MISC_FEATURE: Mature CD80(B7-1)
VIHVTKEVKEVATLSCGHNVSVEELAQTRIYWQKEKKMVLTMMSGDMNIWPEYKNRTIFDITNNLSIVILALRPSDEGTYECVVLKYEKDAFKREHLAEVTLSVKADFPTPSISDFEIPTSNIRRIICSTSGGFPEPHLSWLENGEELNAINTTVSQDPETELYAVSSKLDFNMTTNHSFMCLIKYGHLRVNQTFNWNTTKQEHFPDNLLPSWAITLISVNGIFVICCLTYCFAPRCRERRRNERLRRESVRPV

SEQ ID NO: 190 - protein, 306 aa, Homo sapiens
  MISC_FEATURE: Mature CD86(B7-2)
APLKIQAYFNETADLPCQFANSQNQSLSELVVFWQDQENLVLNEVYLGKEKFDSVHSKYMGRTSFDSDSWTLRLHNLQIKDKGLYQCIIHHKKPTGMIRIHQMNSELSVLANFSQPEIVPISNITENVYINLTCSSIHGYPEPKKMSVLLRTKNSTIEYDGVMQKSQDNVTELYDVSISLSVSFPDVTSNMTIFCILETDKTRLLSSPFSIELEDPQPPPDHIPWITAVLPTVIICVMVFCLILWKWKKKKRPRNSYKCGTNTMEREESEQTKKREKIHIPERSDEAQRVFKSSKTSSCDKSDTCF

SEQ ID NO: 191 - protein, 272 aa, Homo sapiens
  MISC_FEATURE: Mature CD274 (PD-L1, B7-H1)
FTVTVPKDLYVVEYGSNMTIECKFPVEKQLDLAALIVYWEMEDKNIIQFVHGEEDLKVQHSSYRQRARLLKDQLSLGNAALQITDVKLQDAGVYRCMISYGGADYKRITVKVNAPYNKINQRILVVDPVTSEHELTCQAEGYPKAEVIWTSSDHQVLSGKTTTTNSKREEKLFNVTSTLRINTTTNEIFYCTFRRLDPEENHTAELVIPELPLAHPPNERTHLVILGAILLCLGVALTFIFRLRKGRMMDVKKCGIQDTNSKKQSDTHLEET

SEQ ID NO: 192 - protein, 254 aa, Homo sapiens
  MISC_FEATURE: Mature PDCD1LG2(PD-L2, CD273)
LFTVTVPKELYIIEHGSNVTLECNFDTGSHVNLGAITASLQKVENDTSPHRERATLLEEQLPLGKASFHIPQVQVRDEGQYQCIIIYGVAWDYKYLTLKVKASYRKINTHILKVPETDEVELTCQATGYPLAEVSWPNVSVPANTSHSRTPEGLYQVTSVLRLKPPPGRNFSCVFWNTHVRELTLASIDLQSQMEPRTHPTWLLHIFIPFCIIAFIFIATVIALRKQLCQKLYSSKDTTKRPVTTTKREVNSAI

SEQ ID NO: 193 - protein, 284 aa, Homo sapiens
  MISC_FEATURE: Mature ICOSLG(B7RP1, CD275, ICOSL, B7-H2)
DTQEKEVRAMVGSDVELSCACPEGSRFDLNDVYVYWQTSESKTVVTYHIPQNSSLENVDSRYRNRALMSPAGMLRGDFSLRLFNVTPQDEQKFHCLVLSQSLGFQEVLSVEVTLHVAANFSVPVVSAPHSPSQDELTFTCTSINGYPRPNVYWINKTDNSLLDQALQNDTVFLNMRGLYDVVSVLRIARTPSVNIGCCIENVLLQQNLTVGSQTGNDIGERDKITENPVSTGEKNAATWSILAVLCLLVVVAVAIGWVCRDRCLQHSYAGAWAVSPETELTGHV

SEQ ID NO: 194 - protein, 506 aa, Homo sapiens
  MISC_FEATURE: Mature CD276(B7-H3)
LEVQVPEDPVVALVGTDATLCCSFSPEPGFSLAQLNLIWQLTDTKQLVHSFAEGQDQGSAYANRTALFPDLLAQGNASLRLQRVRVADEGSFTCFVSIRDFGSAAVSLQVAAPYSKPSMTLEPNKDLRPGDTVTITCSSYQGYPEAEVFWQDGQGVPLTGNVTTSQMANEQGLFDVHSILRVVLGANGTYSCLVRNPVLQQDAHSSVTITPQRSPTGAVEVQVPEDPVVALVGTDATLRCSFSPEPGFSLAQLNLIWQLTDTKQLVHSFTEGRDQGSAYANRTALFPDLLAQGNASLRLQRVRVADEGSFTCFVSIRDFGSAAVSLQVAAPYSKPSMTLEPNKDLRPGDTVTITCSSYRGYPEAEVFWQDGQGVPLTGNVTTSQMANEQGLFDVHSVLRVVLGANGTYSCLVRNPVLQQDAHGSVTITGQPMTFPPEALWVTVGLSVCLIALLVALAFVCWRKIKQSCEEENAGAEDQDGEGEGSKTALQPLKHSDSKEDDGQEIA

SEQ ID NO: 195 - protein, 258 aa, Homo sapiens
  MISC_FEATURE: Mature VTCN1(B7-H4)
LIIGFGISGRHSITVTTVASAGNIGEDGILSCTFEPDIKLSDIVIQWLKEGVLGLVHEFKEGKDELSEQDEMFRGRTAVFADQVIVGNASLRLKNVQLTDAGTYKCYIITSKGKGNANLEYKTGAFSMPEVNVDYNASSETLRCEAPRWFPQPTVVWASQVDQGANFSEVSNTSFELNSENVTMKVVSVLYNVTINNTYSCMIENDIAKATGDIKVTESEIKRRSHLQLLNSKASLCVSSFFAISWALLPLSPYLMLK

SEQ ID NO: 196 - protein, 202 aa, Homo sapiens
  MISC_FEATURE: Mature CD28
NKILVKQSPMLVAYDNAVNLSCKYSYNLFSREFRASLHKGLDSAVEVCVVYGNYSQQLQVYSKTGFNCDGKLGNESVTFYLQNLYVNQTDIYFCKIEVMYPPPYLDNEKSNGTIIHVKGKHLCPSPLFPGPSKPFWVLVVVGGVLACYSLLVTVAFIIFWVRSKRSRLLHSDYMNMTPRRPGPTRKHYQPYAPPRDFAAYRS

SEQ ID NO: 197 - protein, 188 aa, Homo sapiens
  MISC_FEATURE: Mature CTLA4
KAMHVAQPAVVLASSRGIASFVCEYASPGKATEVRVTVLRQADSQVTEVCAATYMMGNELTFLDDSICTGTSSGNQVNLTIQGLRAMDTGLYICKVELMYPPPYYLGIGNGTQIYVIDPEPCPDSDFLLWILAAVSSGLFFYSFLLTAVSLSKMLKKRSPLTTGVYVKMPPTEPECEKQFQPYFIPIN

SEQ ID NO: 198 - protein, 268 aa, Homo sapiens
  MISC_FEATURE: Mature PDCD1(PD-1)
PGWFLDSPDRPWNPPTFSPALLVVTEGDNATFTCSFSNTSESFVLNWYRMSPSNQTDKLAAFPEDRSQPGQDCRFRVTQLPNGRDFHMSVVRARRNDSGTYLCGAISLAPKAQIKESLRAELRVTERRAEVPTAHPSPSPRPAGQFQTLVVGVVGGLLGSLVLLVWVLAVICSRAARGTIGARRTGQPLKEDPSAVPVFSVDYGELDFQWREKTPEPPVPCVPEQTEYATIVFPSGMGTSSPARRGSADGPRSAQPLRPEDGHCSWPL

SEQ ID NO: 199 - protein, 179 aa, Homo sapiens
  MISC_FEATURE: Mature ICOS
EINGSANYEMFIFHNGGVQILCKYPDIVQQFKMQLLKGGQILCDLTKTKGSGNTVSIKSLKFCHSQLSNNSVSFFLYNLDHSHANYYFCNLSIFDPPPFKVTLTGGYLHIYESQLCCQLKFWLPIGCAAFVVVCILGCILICWLTKKKYSSSVHDPNGEYMFMRAVNTAKKSRLTDVTL

SEQ ID NO: 200 - protein, 259 aa, Homo sapiens
  MISC_FEATURE: Mature BTLA(CD272)
KESCDVQLYIKRQSEHSILAGDPFELECPVKYCANRPHVTWCKLNGTTCVKLEDRQTSWKEEKNISFFILHFEPVLPNDNGSYRCSANFQSNLIESHSTTLYVTDVKSASERPSKDEMASRPWLLYRLLPLGGLPLLITTCFCLFCCLRRHQGKQNELSDTAGREINLVDAHLKSEQTEASTRQNSQVLLSETGIYDNDPDLCFRMQEGSEVYSNPCLEENKPGIVYASLNHSVIGPNSRLARNVKEAPTEYASICVRS

SEQ ID NO: 201 - protein, 433 aa, Homo sapiens
  MISC_FEATURE: Mature CD4
KKVVLGKKGDTVELTCTASQKKSIQFHWKNSNQIKILGNQGSFLTKGPSKLNDRADSRRSLWDQGNFPLIIKNLKIEDSDTYICEVEDQKEEVQLLVFGLTANSDTHLLQGQSLTLTLESPPGSSPSVQCRSPRGKNIQGGKTLSVSQLELQDSGTWTCTVLQNQKKVEFKIDIVVLAFQKASSIVYKKEGEQVEFSFPLAFTVEKLTGSGELWWQAERASSSKSWITFDLKNKEVSVKRVTQDPKLQMGKKLPLHLTLPQALPQYAGSGNLTLALEAKTGKLHQEVNLVVMRATQLQKNLTCEVWGPTSPKLMLSLKLENKEAKVSKREKAVWVLNPEAGMWQCLLSDSGQVLLESNIKVLPTWSTPVQPMALIVLGGVAGLLLFIGLGIFFCVRCRHRRRQAERMSQIKRLLSEKKTCQCPHRFQKTCSPI

SEQ ID NO: 202 - protein, 214 aa, Homo sapiens
  MISC_FEATURE: Mature CD8A(CD8-alpha)
SQFRVSPLDRTWNLGETVELKCQVLLSNPTSGCSWLFQPRGAAASPTFLLYLSQNKPKAAEGLDTQRFSGKRLGDTFVLTLSDFRRENEGYYFCSALSNSIMYFSHFVPVFLPAKPTTTPAPRPPTPAPTIASQPLSLRPEACRPAAGGAVHTRGLDFACDIYIWAPLAGTCGVLLLSLVITLYCNHRNRRRVCKCPRPVVKSGDKPSLSARYV

SEQ ID NO: 203 - protein, 189 aa, Homo sapiens
  MISC_FEATURE: Mature CD8B(CD8-beta)
LQQTPAYIKVQTNKMVMLSCEAKISLSNMRIYWLRQRQAPSSDSHHEFLALWDSAKGTIHGEEVEQEKIAVFRDASRFILNLTSVKPEDSGIYFCMIVGSPELTFGKGTQLSVVDFLPTTAQPTKKSTLKKRVCRLPRPETQKGPLCSPITLGLLVAGVLVLLVSLGVAIHLCCRRRRARLRFMKQFYK

SEQ ID NO: 204 - protein, 497 aa, Homo sapiens
  MISC_FEATURE: Mature LAG3
VPVVWAQEGAPAQLPCSPTIPLQDLSLLRRAGVTWQHQPDSGPPAAAPGHPLAPGPHPAAPSSWGPRPRRYTVLSVGPGGLRSGRLPLQPRVQLDERGRQRGDFSLWLRPARRADAGEYRAAVHLRDRALSCRLRLRLGQASMTASPPGSLRASDWVILNCSFSRPDRPASVHWFRNRGQGRVPVRESPHHHLAESFLFLPQVSPMDSGPWGCILTYRDGFNVSIMYNLTVLGLEPPTPLTVYAGAGSRVGLPCRLPAGVGTRSFLTAKWTPPGGGPDLLVTGDNGDFTLRLEDVSQAQAGTYTCHIHLQEQQLNATVTLAIITVTPKSFGSPGSLGKLLCEVTPVSGQERFVWSSLDTPSQRSFSGPWLEAQEAQLLSQPWQCQLYQGERLLGAAVYFTELSSPGAQRSGRAPGALPAGHLLLFLILGVLSLLLLVTGAFGFHLWRRQWRPRRFSALEQGIHPPQAQSKIEELEQEPEPEPEPEPEPEPEPEPEQL

SEQ ID NO: 205 - protein, 280 aa, Homo sapiens
  MISC_FEATURE: Mature HAVCR2(TIM-3)
SEVEYRAEVGQNAYLPCFYTPAAPGNLVPVCWGKGACPVFECGNVVLRTDERDVNYWTSRYWLNGDFRKGDVSLTIENVTLADSGIYCCRIQIPGIMNDEKFNLKLVIKPAKVTPAPTRQRDFTAAFPRMLTTRGHGPAETQTLGSLPDINLTQISTLANELRDSRLANDLRDSGATIRIGIYIGAGICAGLALALIFGALIFKWYSHSKEKIQNLSLISLANLPPSGLANAVAEGIRSEENIYTIEENVYEVEEPNEYYCYVSSRQQPSQPLGCRFAMP

SEQ ID NO: 206 - protein, 492 aa, Homo sapiens
  MISC_FEATURE: Mature CEACAM1
QLTTESMPFNVAEGKEVLLLVHNLPQQLFGYSWYKGERVDGNRQIVGYAIGTQQATPGPANSGRETIYPNASLLIQNVTQNDTGFYTLQVIKSDLVNEEATGQFHVYPELPKPSISSNNSNPVEDKDAVAFTCEPETQDTTYLWWINNQSLPVSPRLQLSNGNRTLTLLSVTRNDTGPYECEIQNPVSANRSDPVTLNVTYGPDTPTISPSDTYYRPGANLSLSCYAASNPPAQYSWLINGTFQQSTQELFIPNITVNNSGSYTCHANNSVTGCNRTTVKTIIVTELSPVVAKPQIKASKTTVTGDKDSVNLTCSTNDTGISIRWFFKNQSLPSSERMKLSQGNTTLSINPVKREDAGTYWCEVFNPISKNQSDPIMLNVNYNALPQENGLSPGAIAGIVIGVVALVALIAVALACFLHFGKTGRASDQRDLTEHKPSVSNHTQDHSNDPPNKMNEVTYSTLNFEAQQPTQPTSASPSLTATEIIYSEVKKQ

SEQ ID NO: 207 - protein, 222 aa, Homo sapiens
  MISC_FEATURE: Mature TIGIT
MTGTIETTGNISAEKGGSIILQCHLSSTTAQVTQVNWEQQDQLLAICNADLGWHISPSFKDRVAPGPGLGLTLQSLTVNDTGEYFCIYHTYPDGTYTGRIFLEVLESSVAEHGARFQIPLLGAMAATLVVICTAVIVVVALTRKKKALRIHSVEGDLRRKSAGQEEWSPSAPSPPGSCVQAEAAPAGLCGEQRGEDCAELHDYFNVLSYRSLGNCSFFTETG

SEQ ID NO: 208 - protein, 397 aa, Homo sapiens
  MISC_FEATURE: Mature PVR(CD155)
WPPPGTGDVVVQAPTQVPGFLGDSVTLPCYLQVPNMEVTHVSQLTWARHGESGSMAVFHQTQGPSYSESKRLEFVAARLGAELRNASLRMFGLRVEDEGNYTCLFVTFPQGSRSVDIWLRVLAKPQNTAEVQKVQLTGEPVPMARCVSTGGRPPAQITWHSDLGGMPNTSQVPGFLSGTVTVTSLWILVPSSQVDGKNVTCKVEHESFEKPQLLTVNLTVYYPPEVSISGYDNNWYLGQNEATLTCDARSNPEPTGYNWSTTMGPLPPFAVAQGAQLLIRPVDKPINTTLICNVTNALGARQAELTVQVKEGPPSEHSGISRNAIIFLVLGILVFLILLGIGIYFYWSKCSREVLWHCHLCPSSTEHASASANGHVSYSAVSRENSSSQDPQTEGTR

SEQ ID NO: 209 - protein, 507 aa, Homo sapiens
  MISC_FEATURE: Mature PVRL2(CD112)
QDVRVQVLPEVRGQLGGTVELPCHLLPPVPGLYISLVTWQRPDAPANHQNVAAFHPKMGPSFPSPKPGSERLSFVSAKQSTGQDTEAELQDATLALHGLTVEDEGNYTCEFATFPKGSVRGMTWLRVIAKPKNQAEAQKVTFSQDPTTVALCISKEGRPPARISWLSSLDWEAKETQVSGTLAGTVTVTSRFTLVPSGRADGVTVTCKVEHESFEEPALIPVTLSVRYPPEVSISGYDDNWYLGRTDATLSCDVRSNPEPTGYDWSTTSGTFPTSAVAQGSQLVIHAVDSLFNTTFVCTVTNAVGMGRAEQVIFVRETPNTAGAGATGGIIGGIIAAIIATAVAATGILICRQQRKEQTLQGAEEDEDLEGPPSYKPPTPKAKLEAQEMPSQLFTLGASEHSPLKTPYFDAGASCTEQEMPRYHELPTLEERSGPLHPGATSLGSPIPVPPGPPAVEDVSLDLEDEEGEEEEEYLDKINPIYDALSYSSPSDSYQGKGFVMSRAMYV

SEQ ID NO: 210 - protein, 318 aa, Homo sapiens
  MISC_FEATURE: Mature CD226
EEVLWHTSVPFAENMSLECVYPSMGILTQVEWFKIGTQQDSIAIFSPTHGMVIRKPYAERVYFLNSTMASNNMTLFFRNASEDDVGYYSCSLYTYPQGTWQKVIQVVQSDSFEAAVPSNSHIVSEPGKNVTLTCQPQMTWPVQAVRWEKIQPRQIDLLTYCNLVHGRNFTSKFPRQIVSNCSHGRWSVIVIPDVTVSDSGLYRCYLQASAGENETFVMRLTVAEGKTDNQYTLFVAGGTVLLLLFVISITTIIVIFLNRRRRRERRDLFTESWDTQKAPNNYRSPISTSQPTNQSMDDTREDIYVNYPTFSRRPKTRV

SEQ ID NO: 211 - protein, 327 aa, Homo sapiens
  MISC_FEATURE: Mature CD2
KEITNALETWGALGQDINLDIPSFQMSDDIDDIKWEKTSDKKKIAQFRKEKETFKEKDTYKLFKNGTLKIKHLKTDDQDIYKVSIYDTKGKNVLEKIFDLKIQERVSKPKISWTCINTTLTCEVMNGTDPELNLYQDGKHLKLSQRVITHKWTTSLSAKFKCTAGNKVSKESSVEPVSCPEKGLDIYLIIGICGGGSLLMVFVALLVFYITKRKKQRSRRNDEELETRAHRVATEERGRKPHQIPASTPQNPATSQHPPPPPGHRSQAPSHRPPPPGHRVQHQPQKRPPAPSGTQVHQQKGPPLPRPRVQPKPPHGAAENSLSPSSN

SEQ ID NO: 212 - protein, 154 aa, Homo sapiens
  MISC_FEATURE: Mature CD160
INITSSASQEGTRLNLICTVWHKKEEAEGFVVFLCKDRSGDCSPETSLKQLRLKRDPGIDGVGEISSQLMFTISQVTPLHSGTYQCCARSQKSGIRLQGHFFSILFTETGNYTVTGLKQRQHLEFSHNEGTLSSGFLQEKVWVMLVTSLVALQA

SEQ ID NO: 213 - protein, 248 aa, Homo sapiens
  MISC_FEATURE: Mature CD200
QVQVVTQDEREQLYTPASLKCSLQNAQEALIVTWQKKKAVSPENMVTFSENHGVVIQPAYKDKINITQLGLQNSTITFWNITLEDEGCYMCLFNTFGFGKISGTACLTVYVQPIVSLHYKFSEDHLNITCSATARPAPMVFWKVPRSGIENSTVTLSHPNGTTSVTSILHIKDPKNQVGKEVICQVLHLGTVTDFKQTVNKGYWFSVPLLLSIVSLVILLVLISILLYWKRHRNQDRGELSQGVQKMT

SEQ ID NO: 214 - protein, 297 aa, Homo sapiens
  MISC_FEATURE: Mature CD200R1(CD200R)
MDEKQITQNYSKVLAEVNTSWPVKMATNAVLCCPPIALRNLIIITWEIILRGQPSCTKAYRKETNETKETNCTDERITWVSRPDQNSDLQIRPVAITHDGYYRCIMVTPDGNFHRGYHLQVLVTPEVTLFQNRNRTAVCKAVAGKPAAQISWIPEGDCATKQEYWSNGTVTVKSTCHWEVHNVSTVTCHVSHLTGNKSLYIELLPVPGAKKSAKLYIPYIILTIIILTIVGFIWLLKVNGCRKYKLNKTESTPVVEEDEMQPYASYTEKNNPLYDTTNKVKASEALQSEVDTDLHTL

SEQ ID NO: 215 - protein, 183 aa, Homo sapiens
  MISC_FEATURE: Mature NC R3 (NKp30)
LWVSQPPEIRTLEGSSAFLPCSFNASQGRLAIGSVTWFRDEVVPGKEVRNGTPEFRGRLAPLASSRFLHDHQAELHIRDVRGHDASIYVCRVEVLGLGVGTGNGTRLVVEKEHPQLGAGTVLLLRAGFYAVSFLSVAVGSTVYYQGKCLTWKGPRRQLPAVVPAPLPPPCGSSAHLLPPVPGG

SEQ ID NO: 216 - protein, 414 aa, Homo sapiens
  MISC_FEATURE: VSIG8
MRVGGAFHLLLVCLSPALLSAVRINGDGQEVLYLAEGDNVRLGCPYVLDPEDYGPNGLDIEWMQVNSDPAHHRENVFLSYQDKRINHGSLPHLQQRVRFAASDPSQYDASINLMNLQVSDTATYECRVKKTTMATRKVIVTVQARPAVPMCWTEGHMTYGNDVVLKCYASGGSQPLSYKWAKISGHHYPYRAGSYTSQHSYHSELSYQESFHSSINQGLNNGDLVLKDISRADDGLYQCTVANNVGYSVCVVEVKVSDSRRIGVIIGIVLGSLLALGCLAVGIWGLVCCCCGGSGAGGARGAFGYGNGGGVGGGACGDLASEIREDAVAPGCKASGRGSRVTHLLGYPTQNVSRSLRRKYAPPPCGGPEDVALAPCTAAAACEAGPSPVYVKVKSAEPADCAEGPVQCKNGLLV

SEQ ID NO: 217 - protein, 393 aa, Homo sapiens
  MISC_FEATURE: Mature VSIG8
VRINGDGQEVLYLAEGDNVRLGCPYVLDPEDYGPNGLDIEWMQVNSDPAHHRENVFLSYQDKRINHGSLPHLQQRVRFAASDPSQYDASINLMNLQVSDTATYECRVKKTTMATRKVIVTVQARPAVPMCWTEGHMTYGNDVVLKCYASGGSQPLSYKWAKISGHHYPYRAGSYTSQHSYHSELSYQESFHSSINQGLNNGDLVLKDISRADDGLYQCTVANNVGYSVCVVEVKVSDSRRIGVIIGIVLGSLLALGCLAVGIWGLVCCCCGGSGAGGARGAFGYGNGGGVGGGACGDLASEIREDAVAPGCKASGRGSRVTHLLGYPTQNVSRSLRRKYAPPPCGGPEDVALAPCTAAAACEAGPSPVYVKVKSAEPADCAEGPVQCKNGLLV

SEQ ID NO: 218 - protein, 242 aa, Homo sapiens
  MISC_FEATURE: VSIG8 ECD
VRINGDGQEVLYLAEGDNVRLGCPYVLDPEDYGPNGLDIEWMQVNSDPAHHRENVFLSYQDKRINHGSLPHLQQRVRFAASDPSQYDASINLMNLQVSDTATYECRVKKTTMATRKVIVTVQARPAVPMCWTEGHMTYGNDVVLKCYASGGSQPLSYKWAKISGHHYPYRAGSYTSQHSYHSELSYQESFHSSINQGLNNGDLVLKDISRADDGLYQCTVANNVGYSVCVVEVKVSDSRRIG

SEQ ID NO: 219 - protein, 16 aa, Artificial Sequence
  CD33 Signal Peptide
MPLLLLLPLLWAGALA

SEQ ID NO: 220 - protein, 22 aa, Artificial Sequence
  IgGkappa light chain
MDMRVLAQLLGLLLLCFPGARC

SEQ ID NO: 221 - protein, 18 aa, Artificial Sequence
  HSA signal peptide
MKWVTFISLLFLFSSAYS

SEQ ID NO: 222 - protein, 22 aa, Artificial Sequence
  Ig kappa light chain
MDMRAPAGIFGFLLVLFPGYRS

SEQ ID NO: 223 - protein, 19 aa, Artificial Sequence
  Human azurocidin preprotein signal sequence
MTRLTVLALLAGLLASSRA

SEQ ID NO: 224 - protein, 19 aa, Artificial Sequence
  IgG heavy chain signal peptide
MELGLSWIFLLAILKGVQC

SEQ ID NO: 225 - protein, 19 aa, Artificial Sequence
  IgG heavy chain signal peptide
MELGLRWVFLVAILEGVQC

SEQ ID NO: 226 - protein, 19 aa, Artificial Sequence
  IgG heavy chain signal peptide
MKHLWFFLLLVAAPRWVLS

SEQ ID NO: 227 - protein, 19 aa, Artificial Sequence
  IgG heavy chain signal peptide
MDWTWRILFLVAAATGAHS

SEQ ID NO: 228 - protein, 19 aa, Artificial Sequence
  IgG heavy chain signal peptide
MDWTWRFLFVVAAATGVQS

SEQ ID NO: 229 - protein, 19 aa, Artificial Sequence
  IgG heavy chain signal peptide
MEFGLSWLFLVAILKGVQC

SEQ ID NO: 230 - protein, 19 aa, Artificial Sequence
  IgG heavy chain signal peptide
MEFGLSWVFLVALFRGVQC

SEQ ID NO: 231 - protein, 26 aa, Artificial Sequence
  IgG heavy chain signal peptide
MDLLHKNMKHLWFFLLLVAAPRWVLS

SEQ ID NO: 232 - protein, 22 aa, Artificial Sequence
  IgG Kappa light chain signal seqeunce
MDMRVPAQLLGLLLLWLSGARC

SEQ ID NO: 233 - protein, 22 aa, Artificial Sequence
  IgG Kappa light chain signal seqeunce
MKYLLPTAAAGLLLLAAQPAMA

SEQ ID NO: 234 - protein, 17 aa, Artificial Sequence
  Gaussia luciferase
MGVKVLFALICIAVAEA

SEQ ID NO: 235 - protein, 18 aa, Artificial Sequence
  Human albumin
MKWVTFISLLFLFSSAYS

SEQ ID NO: 236 - protein, 18 aa, Artificial Sequence
  Human chymotrypsinogen
MAFLWLLSCWALLGTTFG

SEQ ID NO: 237 - protein, 14 aa, Artificial Sequence
  Human interleukin-2
MQLLSCIALILALV

SEQ ID NO: 238 - protein, 15 aa, Artificial Sequence
  Human trysinogen-2
MNLLLILTFVAAAVA

SEQ ID NO: 239 - protein, 15 aa, Artificial Sequence
  IgV-IgV linker
GGGGSGGGGSGGGGS

SEQ ID NO: 240 - protein, 10 aa, Artificial Sequence
  IgV-Fc linker 1
GGGGSGGGGS

SEQ ID NO: 241 - protein, 13 aa, Artificial Sequence
  IgV-Fc linker 2
GGGGSGGGGSAAA

SEQ ID NO: 242 - protein, 71 aa, Artificial Sequence
  CD8-derived hinge and transmembrane domain
KPTTTPAPRPPTPAPTIASQPLSLRPEASRPAAGGAVHTRGLDFASDIYIWAPLAGTCGVLLLSLVITLYC

SEQ ID NO: 243 - protein, 112 aa, Artificial Sequence
  CD3zeta intracellular signaling domain
RVKFSRSADAPAYQQGQNQLYNELNLGRREEYDVLDKRRGRDPEMGGKPRRKNPQEGLYNELQKDKMAEAYSEIGMKGERRRGKGHDGLYQGLSTATKDTYDALHMQALPPR

SEQ ID NO: 244 - protein, 114 aa, Artificial Sequence
  PD-L1 IgV v1
FTVTVPKDLYVVEYGSNMTIECKFPVENQLDLAALIVYWEVEDKTIIQFVNGEEDLEVQHSSYRQRARLLKDQLSLGNAALQITDVKLQDAGVYRCMISYGGADYKRITVKVNA

SEQ ID NO: 245 - protein, 114 aa, Artificial Sequence
  PD-L1 IgV v2
FTVTVPKDLYVVEYGSNMTLECKFPVEKQLDLAALTVYWEMEDKDITQFVHGEEDLKVQHSSYRQRARLLKDQLSLGNAALQITDVKLQDAGVYRCMISYGGADYKRITVKVNA

SEQ ID NO: 246 - protein, 114 aa, Artificial Sequence
  PD-L1 IgV v3
FTVTVPKDLYVVEYGSNMTLECKFPVEKQLDLAALIVYWEKEDENIIQFVHGEEDLKVQHSSYRQRARLLKDQLSLGNAALQITDVKLQDAGVYRCMISYGGADYKRITVKVNA

SEQ ID NO: 247 - protein, 114 aa, Artificial Sequence
  PD-L1 IgV v4
FTVTVSKDLYVVEYGSNMTIECKFPVEKQLDLAALIVYWEMEDKTIIQFVHGEEDLKVQHSSYRQRARLLKDQLSLGIAALQTTDVKLQDAGVYRCMISYGGADYKRITVKVNA

SEQ ID NO: 248 - protein, 114 aa, Artificial Sequence
  PD-L1 IgV v5
FTVTVPKDLYVVEYGSNMTIECKFPVEKQLDLAALIVYWEMEDKNIIQFVHGEEDLKVQHSSYRQRARLLKDQLSLGIAALQITDVKLQDAGVYRCMISYGGADYKRITVKVNA

SEQ ID NO: 249 - protein, 114 aa, Artificial Sequence
  PD-L1 IgV v6
FTVTVPKDLYVVEYGSNMTIECKFPVEKQLDLAALIVYWEKEDKNIIQFVHGEEDLKVQHSSYRQRARLLKDQLSLGIAALQITDVKLQDAGVYRCMISYGGADYKRITVKVNA

SEQ ID NO: 250 - protein, 114 aa, Artificial Sequence
  PD-L1 IgV v7
FTVTVPKDLYVVEYGSNMTIECKFPVEKQLDLAALIVYWEMEDKTIIQFVHGEEDLKVQHSSYRQRARLLKDQLSLGIAALQITDVKLQDAGVYRCMISYGGADYKRITVKVNA

SEQ ID NO: 251 - protein, 114 aa, Artificial Sequence
  PD-L1 IgV v8
FTVTVPKDLYVVEYGSNMTLECKFPVEKQLDLAALIVYWEMEDKTIIQFVHGEEDLKVQHSSYRQRARLLKDQLSLGNAALQITDVKLQDAGVYRCMISYGGADYKRITVKVNA

SEQ ID NO: 252 - protein, 114 aa, Artificial Sequence
  PD-L1 IgV v9
FTVTVPKDLYVVEYGSNMTIECKFPVEKQLDLAALIVYWEMEDKTIIQFVHGEEDLKVQHSSYRQRARLLKDQLSLGNAALQITDVKLQDAGVYRCMISYGGADYKRITVKVNA

SEQ ID NO: 253 - protein, 114 aa, Artificial Sequence
  PD-L1 IgV v10
FTVTVPKDLYVVEYGSNMTIECKFPVEKQLDLAALIVYWEKEDKNIIQFVHGEEDLKVQHSSYRQRARLLKDQLSLGNAALQITDVKLQDAGVYRCMISYGGADYKRITVKVNA

SEQ ID NO: 254 - protein, 114 aa, Artificial Sequence
  PD-L1 IgV v11
FTVTVPKDLYVVEYGSNMTLECKFPVEKQLDLAALTVYWEMEDKDIIQFVHGEEDLKVQHSSYRQRARLLKDQLSLGNAALQITDVKLQDAGVYRCMISYGGADYKRITVKVNA

SEQ ID NO: 255 - protein, 114 aa, Artificial Sequence
  PD-L1 IgV v12
FTVTVPKDLYVVEYGSDMTIECKFPVEKQLDLAALIVYWEMEDKTIIQFAHGEEDLKVQHSSYRQRARLLKGQLSLGNAALQITDVKLQDAGVYRCMISYGGADYKRITVKVNA

SEQ ID NO: 256 - protein, 114 aa, Artificial Sequence
  PD-L1 IgV v13
FTVTVPKDLYVVEYGSNMTLECKFPVEKQLDLAALIVYWEMEDKNIIQSVHGEEDLKVQHSSYRQRARLLKDQLSLGNAALQITDVKLQDAGVYRCMISYGGADYKRITVKVNA

SEQ ID NO: 257 - protein, 114 aa, Artificial Sequence
  PD-L1 IgV v14
FTVTVPKDLYVVEYGSNMTIECKFPVEKQLDLAALIVYWEMEDKTIIQFAHGEEDLKVQHSSYRQRARLLKDQLSLGNAALQITDVKLQDAGVYRCMISYGGADYKRITVKVNA

SEQ ID NO: 258 - protein, 114 aa, Artificial Sequence
  PD-L1 IgV v15
FTVTVPKDLYVVEYGSNMTLECKFPVEKQLDLAALIVYWEMEDKTIIQFVHGEEDLKVQHSSYRQRARLLKDQLSLGIAALQITDVKLQDAGVYRCMISYGGADYKRITVKVNA

SEQ ID NO: 259 - protein, 114 aa, Artificial Sequence
  PD-L1 IgV v16
FTVTVPKDLYVVEYGSNMTLECKFPVEKQLDLAALIVYWEMEDKTIIQFAHGEEDLKVQHSSYRQRARLLKDQLSLGNAALQITDVKLQDAGVYRCMISYGGADYKRITVKVNA

SEQ ID NO: 260 - protein, 114 aa, Artificial Sequence
  PD-L1 IgV v17
FTVTVPKDLYVVEYGSNMTIECKFPVEKQLDLAALIVYWEVEDKTIIQFVHGEEDLKVQHSSYRQRARLLKDQLSLGNAALQITDVKLQDAGVYRCMISYGGADYKRITVKVNA

SEQ ID NO: 261 - protein, 114 aa, Artificial Sequence
  PD-L1 IgV v18
FTVTVPKDLYVVEYGSNMTIECKFPVEKQLDLAALIVYWEKEDKTIIQFVHGEEDLKVQHSSYRQRARLLKDQLSLGNAALQITDVKLQDAGVYRCMISYGGADYKRITVKVNA

SEQ ID NO: 262 - protein, 114 aa, Artificial Sequence
  PD-L1 IgV v19
FTVTVPKDLYVVEYGSNMTIECKFPVEKQLDLDALIVYWEMEDKNIIQFVHGEEDLKVQHSSYRQRARLLKDQLPLGNAALQITEVKLQDAGVYRCMISYGGADYKRITVKVNA

SEQ ID NO: 263 - protein, 114 aa, Artificial Sequence
  PD-L1 IgV v20
FTVTVPKDLYVVEYGSNITIECKFPVEKQLDLAALIVYWEKEGKNIIQFVRGEEDLKVQHSSYRQRARLLKDQLSLGIAALQITDVKLQDAGVYRCMISYGGADYKRITVKVNA

SEQ ID NO: 264 - protein, 114 aa, Artificial Sequence
  PD-L1 IgV v21
FTVTVPKDLYEVEYGSNMTLECKFPVEKQLDLAALTVYWEMEDKDIIQFVHGEEDLKVQRSSYRQRARLLKDQLPLGNAALQITDVKLQDAGVYRCMISYGGADYKRITVKVNA

SEQ ID NO: 265 - protein, 114 aa, Artificial Sequence
  PD-L1 IgV v22
FTVTVPKDLYVVEYGSNMTIECKFPVEKQLDLDALIVYWEMEDKNIIQFAHGEEDLKVQHSSYRQRARLLKDQLSLGNAALQITDVKLQDAGVYRCMISYGGADYKRITVKVNA

SEQ ID NO: 266 - protein, 114 aa, Artificial Sequence
  PD-L1 IgV v23
FTVTVPKDLYVVEYGGNMTIECKFPVEKQLDLDALIVYWEMEDKNIIQFVHGEEDLKVQHSSYRQRARLLEDQLPLGNAALQITDVKLQDAGVYRCMISYGGADYKRITVKVNA

SEQ ID NO: 267 - protein, 114 aa, Artificial Sequence
  PD-L1 IgV v24
FTVTVPKDLYVVEYGSNMTIECKFPVGKQLDLAALIVYWEMEDKTIIQFVHGEEDLKVQHSSYRQRARLLKDQLSLGNAALQITDVKLQDAGVYRCIISYGGADYKRITVKVNA

SEQ ID NO: 268 - protein, 114 aa, Artificial Sequence
  PD-L1 IgV v25
FTVTVPKDLYVVEYGSNMTIECKFPVGKQLDLAALIVYWEMEDKTIIQFVHGEEDLRVQHSSYRQRARLLKDQLSLGNAALQITDVKLQDAGVYRCMISYGGADYKRITVKVNA

SEQ ID NO: 269 - protein, 114 aa, Artificial Sequence
  PD-L1 IgV v26
FTVTVPKDLYVVEYGSNMTIECKFPVEKQLDLDALIVYWEMEDKNIIQFVHGVEDLKVQHSSYRQRARLLKDQLSLGNAALQITDVKLQDAGVYRCMISYGGADYKRITVKVNA

SEQ ID NO: 270 - protein, 114 aa, Artificial Sequence
  PD-L1 IgV v27
FTVTVPKDLYVVEYGSNMTIECKFPVEKQLDLAALIVYWEMEGKDIIQFVHGEEDLKAQHSSYRQRARLLKDQLSLGNAALQITDVKLQDAGVYRCMISYGGADYKRITVKVNA

SEQ ID NO: 271 - protein, 114 aa, Artificial Sequence
  PD-L1 IgV v28
FTVTVPKDLYVVEYGSNMTIECKFPVEKQLDLAALIVYWGMEVKTIIQFAHGEEDLKVQHSSYRQRARLLKDQLSLGNAALQITDVKLQDAGVYRCMISYGGADYKRITVKVNA

SEQ ID NO: 272 - protein, 114 aa, Artificial Sequence
  PD-L1 IgV v29
FTVTVPKDLYVVESGSNMTIECKFPVEEQLDLAALIVYWEMEDKTIIQFVHGEEDLKVQHSSYRQRARLLKDQLSLGNAALQITDVKLQDAGVYRCMISYGGADYKRITVKVNA

SEQ ID NO: 273 - protein, 114 aa, Artificial Sequence
  PD-L1 IgV v30
FTVTVPKDLYVVEYGSNMTIECKFPVEKQLDLDALIVYWEMEDKNIIQFVHGEEDLKVQHSSYRQRARLLKDQLSLGSAALQITDVKLQDAGVYRCMISYGGADYKRITVKVNA

SEQ ID NO: 274 - protein, 114 aa, Artificial Sequence
  PD-L1 IgV v31
FTVTVPKDLYVVEYGSNMTIECKFPVEKQLDLDALIVYWEMEDKNIIQFVHGEEDLKVQHSSYRQRARLLKDQLSLGIAALQITDVKLQDAGVYRCMISYGGADYKRITVKVNA

SEQ ID NO: 275 - protein, 114 aa, Artificial Sequence
  PD-L1 IgV v32
FTVTVPKDLYVVEYGSNMTIECKFPVEKQLDLDALIVYWEMEDKTIIQFVHGEEDLKVQHSSYRQRARLLKDQLSLGNAALQITDVKLQDAGVYRCMISYGGADYKRITVKVNA

SEQ ID NO: 276 - protein, 114 aa, Artificial Sequence
  PD-L1 IgV v33
FTVTVPKDLYVVEYGSNMTIECKFPVEKQLDLDALIVYWEMEDKTIIQFVHGEEDLKVQHSSYRQRARLLKDQLSLGIAALQITDVKLQDAGVYRCMISYGGADYKRITVKVNA

SEQ ID NO: 277 - protein, 114 aa, Artificial Sequence
  PD-L1 IgV v34
FTVTVPKDLYVVEYGSNMTIECKFPVGKQLDLAALIVYWEMEDKTIIQFAHGEEDLKVQHSSYRQRARLLKDQLSLGNAALQITDVKLQDAGVYRCMISYGGADYKRITVKVNA

SEQ ID NO: 278 - protein, 114 aa, Artificial Sequence
  PD-L1 IgV v35
FTVTVPKDLYVVEYGSNMTIECKFPVEKQLDLAALIVYWEMEDKTIIQFAHGEEDLKVQHSSYRQRARLLKDQLSLGSAALQITDVKLQDAGVYRCMISYGGADYKRITVKVNA

SEQ ID NO: 279 - protein, 114 aa, Artificial Sequence
  PD-L1 IgV v36
FTVTVPKDLYVVEYGSNMTLECKFPVEKQLDLAALIVYWEMEDKTIIQFVHGEEDLKVQHSSYRQRARLLKDQLSLGNAALQITDVKLQDAGVYRCMISYGGADYKRITMKVNA

SEQ ID NO: 280 - protein, 114 aa, Artificial Sequence
  PD-L1 IgV v37
FTVTVPKDLYVVEYGSNMTLECKFPVEKQLDLAALTVYWEMEDKTIIQFAHGEEDLKVQHSSYRQRARLLKDQLSLGNAALQITDVKLQDAGVYRCMISYGGADYKRITVKVNA

SEQ ID NO: 281 - protein, 114 aa, Artificial Sequence
  PD-L1 IgV v38
FTVTVPKDLYVVEYGSNMTIECKFPVEKQLDLAALIVYWEMEDKTIIQFVHGEEDLKVQHSSYRQRARLLKDQPPLGNAALQITDVKLQDAGVYRCMISYGGADYKRITVKVNA

SEQ ID NO: 282 - protein, 114 aa, Artificial Sequence
  PD-L1 IgV v39
FTVTVPKDLYVVEYGSNMTIECKFPVEKQLDLAALIVYWEMEDKTIIQFVHGEEDLKVQHSSYRQRARLLKDQLPLGNAALQITDVKLQDAGVYRCMISYGGADYKRITVKVNA

SEQ ID NO: 283 - protein, 114 aa, Artificial Sequence
  PD-L1 IgV v40
FTVTVPKDLYVVEYGSNMTIECKFPVEKQLDLAALIVYWEMEDKNIIQFVHGEEDLKVQHSSYRQRARLLKDQLPLGNAALQITDVKLQDAGVYRCMISYGGADYRRITVKVNA

SEQ ID NO: 284 - protein, 114 aa, Artificial Sequence
  PD-L1 IgV v41
FTVTVPKDLYVVEYGSNMTIECKFPVEKQLDLAALIVYWEMEDKNIIQFVHGEEDLKVQHSSYRQRARLLKDQLPLGNAALQITDVKLQDAGVYRCMISYGGADYKRITVKVNA

SEQ ID NO: 285 - protein, 114 aa, Artificial Sequence
  PD-L1 IgV v42
FTVTVPKDLYVVEYGSNMTIECKFPVEKQLDLDALIVYWEMEDKNIIQFVHGEEDLKVQHSSYRQRARLLKDQLPLGNAALQITDVKLQDAGVYRCVISYGGADYKRITVKVNA

SEQ ID NO: 286 - protein, 114 aa, Artificial Sequence
  PD-L1 IgV v43
FTVTVPKDLYVVEYGSNMTIECKFPVEKQLDLDALIVYWEMEDKNIIQFVHGEEDLKVQHSSYRQRARLLKDQLPLGNAALQITDVKLQDAGVYRCMISYGGAGYKRITVKVNA

SEQ ID NO: 287 - protein, 114 aa, Artificial Sequence
  PD-L1 IgV v44
FTVTVPKDLYVVEYGSNMTIECKFPVEKQLDLDALIVYWEMEDKNIIQFVHGEEDLKVQHSSYRQRARLLKDQLPLGNAALQITDVKLQDAGVYRCMISYGGADYKRITVKVNA

SEQ ID NO: 288 - protein, 114 aa, Artificial Sequence
  PD-L1 IgV v45
FTVTVPKDLYVVEYGSNMTLECKFPVGKQLDLAALIVYWEMEDKTIIQFAHGEEDLKVQHSSYRQRARLLKDQLSLGNAALQITDVKLQDAGVYRCMISYGGADYKRITVKVNA

SEQ ID NO: 289 - protein, 114 aa, Artificial Sequence
  PD-L1 IgV v46
FTVTVPKDLYVVEYGSNMTLECKFPVGKQLDLAALIVYWEMEGKDIIQFVHGEEDLKAQHSSYRQRARLLKDQLSLGIAALQITDVKLQDAGVYRCMISYGGADYKRITVKVNA

SEQ ID NO: 290 - protein, 114 aa, Artificial Sequence
  PD-L1 IgV v47
FTVTVPKDLYVVEYGSNMTLECKFPVEKQLDLAALIVYWEMEGKDIIQFVHGEEDLKAQHSSYRQRARLLKDQLSLGIAALQITDVKLQDAGVYRCMISYGGADYKRITVKVNA

SEQ ID NO: 291 - protein, 114 aa, Artificial Sequence
  PD-L1 IgV v48
FTVTVPKDLYVVEYGSNMTLECKFPVEKQLDLDALIVYWEMEGKDIIQFVHGEEDLKAQHSSYRQRARLLKDQLSLGIAALQITDVKLQDAGVYRCMISYGGADYKRITVKVNA

SEQ ID NO: 292 - protein, 114 aa, Artificial Sequence
  PD-L1 IgV v49
FTVTVPKDLYVVEYGSNMTLECKFPVEKQLDLAALIVYWEMEGKDIIQFVHGEEDLKVQHSSYRQRARLLKDQLSLGIAALQITDVKLQDAGVYRCMISYGGADYKRITVKVNA

SEQ ID NO: 293 - protein, 114 aa, Artificial Sequence
  PD-L1 IgV v50
FTVTVPKDLYVVEYGSNMTIECKFPVGKQLDLAALIVYWEMEDKTIIQFAHGEEDLKVQHSSYRQRARLLKDQLSLGIAALQITDVKLQDAGVYRCMISYGGADYKRITVKVNA

SEQ ID NO: 294 - protein, 114 aa, Artificial Sequence
  PD-L1 IgV v51
FTVTVPKDLYVVEYGSNMTIECKFPVEKQLDLAALIVYWEMEDKTIIQFAHGEEDLKVQHSSYRQRARLLKDQLSLGIAALQITDVKLQDAGVYRCMISYGGADYKRITVKVNA

SEQ ID NO: 295 - protein, 114 aa, Artificial Sequence
  PD-L1 IgV v52
FTVTVPKDLYAVEYGSNMTLECKFPVGKQLDLAALIVYWEMEGKDIIQFVYGEEDLKVQHSSYRQRARLLKDQLSLGNAALQITDVKLQDAGVYRCMIGYGGADYKRITVKVNA

SEQ ID NO: 296 - protein, 114 aa, Artificial Sequence
  PD-L1 IgV v53
FTVTVPKDLYVVEYGSNMTLECKFPVGKQLDLAALIVYWEMEGKTIIQFAHGEEDLKVQHSSYRQRARLLKDQLSLGNAALQITDVKLQDAGVYRCMISYGGADYKRITVKVNA

SEQ ID NO: 297 - protein, 114 aa, Artificial Sequence
  PD-L1 IgV v54
FTVTVPKDLYVVEYGSNMTLECKFPVEEQLDLAALIVYWEMEGKDIIQFVHGEEDLKAQHSSYRQRARLLKDQLSLGNAALQITDVKLRDAGVYRCMISYGGADYKRITVKVNA

SEQ ID NO: 298 - protein, 114 aa, Artificial Sequence; identical to SEQ ID NO: 254
  PD-L1 IgV v55

SEQ ID NO: 299 - protein, 114 aa, Artificial Sequence
  PD-L1 IgV v56
FTVTVPKDLYVVEYGSNMTLECKFPVEEQLDLAALIVYWEMEGKDIIQFVHGGEDLKAQHSSYRQRARLLKDQLSLGIAALQITDVKLQDAGVYRCMISYGGADYKRITVKVNA

SEQ ID NO: 300 - protein, 114 aa, Artificial Sequence
  PD-L1 IgV v57
FTVTVPKDLYVVEYGSNMTIECKFPVEKQLDLDALIVYWEMEGKDIIQFVHGEEDLKAQHSSYRQRARLLKDQLPLGNAALQITDVKLQDAGVYRCMISYGGADYKRITVKVNA

SEQ ID NO: 301 - protein, 114 aa, Artificial Sequence
  PD-L1 IgV v58
FTVTVPKDLYVVEYGSNMTIECRFPVEKQLDLAALIVYWEMEGKDIIQFVHGEEDLKVQHSSYRQRARLLKDQLSLGNAALQITDVKLQDAGVYRCMISYGGADYKRITVKVNA

SEQ ID NO: 302 - protein, 114 aa, Artificial Sequence
  PD-L1 IgV v59
FTVTVPKDLYVVEYGSNMTLECKFPVEKQLDLAALIVYWEMEGKDIIQFVHGEEDLKAQHSSYRQRARLLKDQLSLGIAALQITDVKLQGAGVYRCMISYDGADYKRITVKVNA

SEQ ID NO: 303 - protein, 115 aa, Artificial Sequence
  PD-L1 IgV v60
FTVTVPKDLYVVEYGSNMTIECKFPVEKQLDLAALIVYWEMEGKDIIQFVHGEEDQKAQHSSYRQRARLLKDQLSLGNAALQITDVKLQDAGVYRCMISYGGGADYKRITVKVNA

SEQ ID NO: 304 - protein, 114 aa, Artificial Sequence
  PD-L1 IgV v61
FTVTVPKDLYVVEYGSNMTLECEFPVEKQLDLAALIVYWEMEGKDIIQFVHGEEDLKAQHSSYRQRARLLKDQLSLGIAALQITDVKLQDAGVYRCMISYGGADYKRITVKVNA

SEQ ID NO: 305 - protein, 114 aa, Artificial Sequence
  PD-L1 IgV v62
FTVTVPKDLYVVEYGSNMTLECEFPVEKQLDLAALIVYWEMEGKDIIQFAHGEEDLKVQHSSYRQRARLLKDQLSLGIAALQITDVKLQDAGVYRCMISYGGADYKRITVKVNA

SEQ ID NO: 306 - protein, 114 aa, Artificial Sequence
  PD-L1 IgV v63
FTVTVPKDLYVVEYGSNMIIECKFPVGKQLDLAALIVYWEMEDKIIIQFAHGEEDLKVQHSSYRQRARLLKDQLSLGIAALQITDVKLQDAGVYRCKISYGGADYKRITVKVNA

SEQ ID NO: 307 - protein, 114 aa, Artificial Sequence
  PD-L1 IgV v64
FTVTVPKDLYVVEYGSNMTLECKFPVEKQLDLAALIVYWEKEGKDIIQFVHGEEDLKVQHSSYRQRARLLKDQLSLGNAALQITDVKLQDAGVYRCMISYGGADYKRITVKVNA

SEQ ID NO: 308 - protein, 114 aa, Artificial Sequence
  PD-L1 IgV v65
FTVTVPKDLYVVEYGSNMTIECRFPVEKQLDLAALIVYWEMEDKTIIQFVHGEEDLKVQHSSYRQRARLLKDQLSLGIAALQITDVKLQDAGVYRCMISYGGADYKRITVKVNA

SEQ ID NO: 309 - protein, 114 aa, Homo sapiens
  MISC_FEATURE: PD-L1 IgV wildtype
FTVTVPKDLYVVEYGSNMTIECKFPVEKQLDLAALIVYWEMEDKNIIQFVHGEEDLKVQHSSYRQRARLLKDQLSLGNAALQITDVKLQDAGVYRCMISYGGADYKRITVKVNA

SEQ ID NO: 310 - protein, 116 aa, Homo sapiens
  MISC_FEATURE: CD155 IgV
PGTGDVVVQAPTQVPGFLGDSVTLPCYLQVPNMEVTHVSQLTWARHGESGSMAVFHQTQGPSYSESKRLEFVAARLGAELRNASLRMFGLRVEDEGNYTCLFVTFPQGSRSVDIWL

SEQ ID NO: 311 - protein, 323 aa, Artificial Sequence
  CD155 v1 ECD
WPPPGTGDVVVQAPTQVSGFLGDSVTLPCYLQVPNMEVTHVSQLTWARHGESGSMAVFHQTQGSSYSESKRLEFVAARLGAELRNASLRMSGLRVEDEGNYTCLFVTFPQGSRSVDIWLRVLAKPQNTAEVQKVQLTGEPVPMARCVSTGGRPPAQITWHSDLGGMPNTSQVPGFLSGTVTVTSLWILVPSSQVDGKNVTCKVEHESFEKPQLLTVNLTVYYPPEVSISGYDNNWYLGQNEATLTCDARSNPEPTGYNWSTTMGPLPPFAVAQGAQLLIRPVDKPINTTLICNVTNALGARQAELTVQVKEGPPSEHSGISRN

SEQ ID NO: 312 - protein, 323 aa, Artificial Sequence
  CD155 v2 ECD
WPPPGTGDVVVQAPTQVSGFLGDSVTLPCYLQVPNMEVTHVSQLTWARHGESGSMAVFHQTQGPSYSESKRLEFVAARLGAELRNASLRMSGLRVEDEGNYTCPFVTFPQGSRSVDIWLRVLAKPQNTAEVQKVQLTGEPVPMARCVSTGGRPPAQITWHSDLGGMPNTSQVPGFLSGTVTVTSLWILVPSSQVDGKNVTCKVEHESFEKPQLLTVNLTVYYPPEVSISGYDNNWYLGQNEATLTCDARSNPEPTGYNWSTTMGPLPPFAVAQGAQLLIRPVDKPINTTLICNVTNALGARQAELTVQVKEGPPSEHSGISRN

SEQ ID NO: 313 - protein, 323 aa, Artificial Sequence
  CD155 v3 ECD
WPPPGTGDVVVQAPTQVPGFLGDSVTLPCYLQVPNMEVTHVSQPTWARHGESGSMAVFHQTQGPSYSESKRLEFVAARLGAELRNASLRMFGLRVEDEGNYTCLFVTFPQGSRSVDIWLRVLAKPQNTAEVQKVQLTGEPVPMARCVSTGGRPPAQITWHSDLGGMPNTSQVPGFLSGTVTVTSLWILVPSSQVDGKNVTCKVEHESFEKPQLLTVNLTVYYPPEVSISGYDNNWYLGQNEATLTCDARSNPEPTGYNWSTTMGPLPPFAVAQGAQLLIRPVDKPINTTLICNVTNALGARQAELTVQVKEGPPSEHSGISRN

SEQ ID NO: 314 - protein, 323 aa, Artificial Sequence
  CD155 v4 ECD
WPPPGTGDVVVQAPTQVPGFLGDSVTLPCYLQVPNMEVTHVSQLTWARHGESGSMVVFHQTQGPSYSESKRLEFVAARLGAELRNASLRMFGLRVEDEGNYTCLFVTFPQGSRSVDIWLRVLAKPQNTAEVQKVQLTGEPVPMARCVSTGGRPPAQITWHSDLGGMPNTSQVPGFLSGTVTVTSLWILVPSSQVDGKNVTCKVEHESFEKPQLLTVNLTVYYPPEVSISGYDNNWYLGQNEATLTCDARSNPEPTGYNWSTTMGPLPPFAVAQGAQLLIRPVDKPINTTLICNVTNALGARQAELTVQVKEGPPSEHSGISRN

SEQ ID NO: 315 - protein, 323 aa, Artificial Sequence
  CD155 v5 ECD
WPPPGTGDVVVQAPTQVLGFLGDSVTLPCYLQVPNMEVTHVSQLTWARHGESGSMAVFHQTQGPSYSESKRLEFVAARVGAELRNASLRMSGLRVEDEGNYTCLFVTFPQGSRSVDIWLRVLAKPQNTAEVQKVQLTGEPVPMARCVSTGGRPPAQITWHSDLGGMPNTSQVPGFLSGTVTVTSLWILVPSSQVDGKNVTCKVEHESFEKPQLLTVNLTVYYPPEVSISGYDNNWYLGQNEATLTCDARSNPEPTGYNWSTTMGPLPPFAVAQGAQLLIRPVDKPINTTLICNVTNALGARQAELTVQVKEGPPSEHSGISRN

SEQ ID NO: 316 - protein, 323 aa, Artificial Sequence
  CD155 v6 ECD
WPPPGTGDVVVQAPTQVSGFLGDSVTLPCYLQVPNMEVTHVSQLTWARHGESGSMAVFHQTQGPSYSESKRLEFVAARLGAELRNASLRMSGLRVEDEGNYTCLFVTFPQGSRSVDIWLRVLAKPQNTAEVQKVQLTGEPVPMARCVSTGGRPPAQITWHSDLGGMPNTSQVPGFLSGTVTVTSLWILVPSSQVDGKNVTCKVEHESFEKPQLLTVNLTVYYPPEVSISGYDNNWYLGQNEATLTCDARSNPEPTGYNWSTTMGPLPPFAVAQGAQLLIRPVDKPINTTLICNVTNALGARQAELTVQVKEGPPSEHSGISRN

SEQ ID NO: 317 - protein, 323 aa, Artificial Sequence
  CD155 v7 ECD
WPPPGTGDVVVQAPTQVTGFLGDSVTLPCYLQVPNMEVTHVSQLTWARHGESGSMAVFHQTQGPSYSESKRLEFVAARLGAELRNASLRMSGLRVEDEGNYTCLFVTFPQGSRSVDIWLRVLAKPQNTAEVQKVQLTGEPVPMARCVSTGGRPPAQITWHSDLGGMPNTSQVPGFLSGTVTVTSLWILVPSSQVDGKNVTCKVEHESFEKPQLLTVNLTVYYPPEVSISGYDNNWYLGQNEATLTCDARSNPEPTGYNWSTTMGPLPPFAVAQGAQLLIRPVDKPINTTLICNVTNALGARQAELTVQVKEGPPSEHSGISRN

SEQ ID NO: 318 - protein, 323 aa, Artificial Sequence
  CD155 v8 ECD
WPPPGTGDVVVQAPTQVTGFLGDSVTLPCYLQVPNMEVTHVPQLTWARHGESGSMAVFHQTQGPSYSESKRLEFVAARLGAELRNASLRMSGLRVEDEGNYTCLFVTFPQGSRSVDIWLRVLAKPQNTAEVQKVQLTGEPVPMARCVSTGGRPPAQITWHSDLGGMPNTSQVPGFLSGTVTVTSLWILVPSSQVDGKNVTCKVEHESFEKPQLLTVNLTVYYPPEVSISGYDNNWYLGQNEATLTCDARSNPEPTGYNWSTTMGPLPPFAVAQGAQLLIRPVDKPINTTLICNVTNALGARQAELTVQVKEGPPSEHSGISRN

SEQ ID NO: 319 - protein, 323 aa, Artificial Sequence
  CD155 v9 ECD
WPPPGTEDVVVQAPTQVTGFLGDSVTLPCCLQVPNMEVTHVSQLTWARHGESGSMAVFHQTQGPSYSESKRLEFVAARLGAELRNASLRMSGLRVEDEGNYTCLFVTFPQGSRSVDIWLRVLAKPQNTAEVQKVQLTGEPVPMARCVSTGGRPPAQITWHSDLGGMPNTSQVPGFLSGTVTVTSLWILVPSSQVDGKNVTCKVEHESFEKPQLLTVNLTVYYPPEVSISGYDNNWYLGQNEATLTCDARSNPEPTGYNWSTTMGPLPPFAVAQGAQLLIRPVDKPINTTLICNVTNALGARQAELTVQVKEGPPSEHSGISRN

SEQ ID NO: 320 - protein, 323 aa, Artificial Sequence
  CD155 v10 ECD
WPPPGTGDVVVQAPTQVTGFLGDSVTLPCYLQVPNMEVTHVSQLTWARHGESGSMAVFHQTQGPSYSESKRLEFVAARLGAELRNASLRMSGLRVEDEGNYTCLFVTFPQDSRSVDIWLRVLAKPQNTAEVQKVQLTGEPVPMARCVSTGGRPPAQITWHSDLGGMPNTSQVPGFLSGTVTVTSLWILVPSSQVDGKNVTCKVEHESFEKPQLLTVNLTVYYPPEVSISGYDNNWYLGQNEATLTCDARSNPEPTGYNWSTTMGPLPPFAVAQGAQLLIRPVDKPINTTLICNVTNALGARQAELTVQVKEGPPSEHSGISRN

SEQ ID NO: 321 - protein, 323 aa, Artificial Sequence
  CD155 v11 ECD
WPPPGTGDVVVQAPTQVSGFLGDSVTLPCYLQVPNMEVTHVSQLTWARHGESGSMAVFHQTQGPSYSESKRLEFVAARLGAELRNASLRMPGLRVEDEGNYTCLFVTFPQGSRSVDIWLRVLAKPQNTAEVQKVQLTGEPVPMARCVSTGGRPPAQITWHSDLGGMPNTSQVPGFLSGTVTVTSLWILVPSSQVDGKNVTCKVEHESFEKPQLLTVNLTVYYPPEVSISGYDNNWYLGQNEATLTCDARSNPEPTGYNWSTTMGPLPPFAVAQGAQLLIRPVDKPINTTLICNVTNALGARQAELTVQVKEGPPSEHSGISRN

SEQ ID NO: 322 - protein, 323 aa, Artificial Sequence
  CD155 v12 ECD
WPPPGTGDVVVQAPTQVTGFLGDSVTLPCYLQVPNMEVTHVSQLTWARHGESGSMAVFHQTQGPSYSESKRLEFVAARLGAELRNASLRMSGLRVEDEGNYTCLFVTLPQGSRSVDIWLRVLAKPQNTAEVQKVQLTGEPVPMARCVSTGGRPPAQITWHSDLGGMPNTSQVPGFLSGTVTVTSLWILVPSSQVDGKNVTCKVEHESFEKPQLLTVNLTVYYPPEVSISGYDNNWYLGQNEATLTCDARSNPEPTGYNWSTTMGPLPPFAVAQGAQLLIRPVDKPINTTLICNVTNALGARQAELTVQVKEGPPSEHSGISRN

SEQ ID NO: 323 - protein, 323 aa, Artificial Sequence
  CD155 v14 ECD
WPPPGTGDVVVQAPTQVTGFLGDSVTLPCYLQVPNMEVTHVSQLAWARHGESGSMAVFHQTQGPSYSESKRLEFVAARLGAELRNASLRMSGLRVEDEGNYTCLFVTFPQGSRSVDIWLRVLAKPQNTAEVQKVQLTGEPVPMARCVSTGGRPPAQITWHSDLGGMPNTSQVPGFLSGTVTVTSLWILVPSSQVDGKNVTCKVEHESFEKPQLLTVNLTVYYPPEVSISGYDNNWYLGQNEATLTCDARSNPEPTGYNWSTTMGPLPPFAVAQGAQLLIRPVDKPINTTLICNVTNALGARQAELTVQVKEGPPSEHSGISRN

SEQ ID NO: 324 - protein, 323 aa, Artificial Sequence
  CD155 v15 ECD
WPPPGTGDVVVQAPTQVTGFLGDSVTLPCYLQVPNMEVTHVSQLTWARHGESGSMAVFHQTQGPSYSESKRLEFVAARLGAELRNASLRMSGLHVEDEGNYTCLFVTFPQGSRSVDIWLRVLAKPQNTAEVQKVQLTGEPVPMARCVSTGGRPPAQITWHSDLGGMPNTSQVPGFLSGTVTVTSLWILVPSSQVDGKNVTCKVEHESFEKPQLLTVNLTVYYPPEVSISGYDNNWYLGQNEATLTCDARSNPEPTGYNWSTTMGPLPPFAVAQGAQLLIRPVDKPINTTLICNVTNALGARQAELTVQVKEGPPSEHSGISRN

SEQ ID NO: 325 - protein, 323 aa, Artificial Sequence
  CD155 v16 ECD
WPPPGTGDVVVQAPTQVSGFLGDSVTLPCCLQVPNMEVTHVSQLTWARHGESGSMAVFHQTQGPSYSESKRLEFVAARLGAELRNASLRMSGLRVEDEGNYTCLFVTFPQGSRSVDIWLRVLAKPQNTAEVQKVQLTGEPVPMARCVSTGGRPPAQITWHSDLGGMPNTSQVPGFLSGTVTVTSLWILVPSSQVDGKNVTCKVEHESFEKPQLLTVNLTVYYPPEVSISGYDNNWYLGQNEATLTCDARSNPEPTGYNWSTTMGPLPPFAVAQGAQLLIRPVDKPINTTLICNVTNALGARQAELTVQVKEGPPSEHSGISRN

SEQ ID NO: 326 - protein, 323 aa, Artificial Sequence
  CD155 v17 ECD
WPPPGTGDVVVQAPTQVPGFLGDSVTLPCYLQVPNMEVTHVSQLTWARHGESGSMAVFHQTQGPSYSESKRLEFVAARLGVEPRNASLRMFGLRVEDEGNYTCLFVTFPQGSRSVDIWLRVLAKPQNTAEVQKVQLTGEPVPMARCVSTGGRPPAQITWHSDLGGMPNTSQVPGFLSGTVTVTSLWILVPSSQVDGKNVTCKVEHESFEKPQLLTVNLTVYYPPEVSISGYDNNWYLGQNEATLTCDARSNPEPTGYNWSTTMGPLPPFAVAQGAQLLIRPVDKPINTTLICNVTNALGARQAELTVQVKEGPPSEHSGISRN

SEQ ID NO: 327 - protein, 323 aa, Artificial Sequence
  CD155 v18 ECD
WPPPGTGDVVVQAPTQVPGFLGDSVTLPCYLQVPNMEVTHVSQLTWARHGESGSMAVFHQTQGPSYSESKRLEFVAARLGAELRNASPRMFGLRVEDEGNYTCLFVTFPQGSRSVDIWLRVLAKPQNTAEVQKVQLTGEPVPMARCVSTGGRPPAQITWHSDLGGMPNTSQVPGFLSGTVTVTSLWILVPSSQVDGKNVTCKVEHESFEKPQLLTVNLTVYYPPEVSISGYDNNWYLGQNEATLTCDARSNPEPTGYNWSTTMGPLPPFAVAQGAQLLIRPVDKPINTTLICNVTNALGARQAELTVQVKEGPPSEHSGISRN

SEQ ID NO: 328 - protein, 323 aa, Artificial Sequence
  CD155 v19 ECD
WPPPGTGDVVVQAPTQVPGFLGDSVTLPCYLQVPNMEVTHVSQLTWARHGESGSMAVFHQTQGPSYSESKRLEFVAARLGAELRNASLRMFGLHVEDEGNYTCLFVTFPQGSRSVDIWLRVLAKPQNTAEVQKVQLTGEPVPMARCVSTGGRPPAQITWHSDLGGMPNTSQVPGFLSGTVTVTSLWILVPSSQVDGKNVTCKVEHESFEKPQLLTVNLTVYYPPEVSISGYDNNWYLGQNEATLTCDARSNPEPTGYNWSTTMGPLPPFAVAQGAQLLIRPVDKPINTTLICNVTNALGARQAELTVQVKEGPPSEHSGISRN

SEQ ID NO: 329 - protein, 323 aa, Artificial Sequence
  CD155 v20 ECD
WPPPGTGDVVVQEPTQVSGFLGDSVTLPCYLQVPNMEVTHVSQLTWARHGESGSMVVFHQTQGPSYSESKRLEFVAARLGAELRNASLRMSGLRVEDEGNYTCLFVTFPQGSRSVDIWLRVLAKPQNTAEVQKVQLTGEPVPMARCVSTGGRPPAQITWHSDLGGMPNTSQVPGFLSGTVTVTSLWILVPSSQVDGKNVTCKVEHESFEKPQLLTVNLTVYYPPEVSISGYDNNWYLGQNEATLTCDARSNPEPTGYNWSTTMGPLPPFAVAQGAQLLIRPVDKPINTTLICNVTNALGARQAELTVQVKEGPPSEHSGISRN

SEQ ID NO: 330 - protein, 323 aa, Artificial Sequence
  CD155 v21 ECD
WPPPGTGDVVVQAPTQVTGFLGDSVTLPCYLQVPNMEVTHVSQLTWARHGESGSMAVFHQTQGPSYSESKRLEFVAARLGAELRNASLRMSGLRVEDEGNYTCLFVTFPQGSRSADIWLRVLAKPQNTAEVQKVQLTGEPVPMARCVSTGGRPPAQITWHSDLGGMPNTSQVPGFLSGTVTVTSLWILVPSSQVDGKNVTCKVEHESFEKPQLLTVNLTVYYPPEVSISGYDNNWYLGQNEATLTCDARSNPEPTGYNWSTTMGPLPPFAVAQGAQLLIRPVDKPINTTLICNVTNALGARQAELTVQVKEGPPSEHSGISRN

SEQ ID NO: 331 - protein, 323 aa, Artificial Sequence
  CD155 v22 ECD
WPPPGTGDVVVQAPTQVTGFLGDSVTLPCYLQVPNMEVTHVSQLTWARHGESGSMAVFHKTQGPSYSESKRLEFVAARLGAELRNASLRMFGLRVEDEGNYTCLFVTFPQGSRSVDIWLRVLAKPQNTAEVQKVQLTGEPVPMARCVSTGGRPPAQITWHSDLGGMPNTSQVPGFLSGTVTVTSLWILVPSSQVDGKNVTCKVEHESFEKPQLLTVNLTVYYPPEVSISGYDNNWYLGQNEATLTCDARSNPEPTGYNWSTTMGPLPPFAVAQGAQLLIRPVDKPINTTLICNVTNALGARQAELTVQVKEGPPSEHSGISRN

SEQ ID NO: 332 - protein, 116 aa, Artificial Sequence
  CD155 v1 IgV
PGTGDVVVQAPTQVSGFLGDSVTLPCYLQVPNMEVTHVSQLTWARHGESGSMAVFHQTQGSSYSESKRLEFVAARLGAELRNASLRMSGLRVEDEGNYTCLFVTFPQGSRSVDIWL

SEQ ID NO: 333 - protein, 116 aa, Artificial Sequence
  CD155 v2 IgV
PGTGDVVVQAPTQVSGFLGDSVTLPCYLQVPNMEVTHVSQLTWARHGESGSMAVFHQTQGPSYSESKRLEFVAARLGAELRNASLRMSGLRVEDEGNYTCPFVTFPQGSRSVDIWL

SEQ ID NO: 334 - protein, 116 aa, Artificial Sequence
  CD155 v3 IgV
PGTGDVVVQAPTQVPGFLGDSVTLPCYLQVPNMEVTHVSQPTWARHGESGSMAVFHQTQGPSYSESKRLEFVAARLGAELRNASLRMFGLRVEDEGNYTCLFVTFPQGSRSVDIWL

SEQ ID NO: 335 - protein, 116 aa, Artificial Sequence
  CD155 v4 IgV
PGTGDVVVQAPTQVPGFLGDSVTLPCYLQVPNMEVTHVSQLTWARHGESGSMVVFHQTQGPSYSESKRLEFVAARLGAELRNASLRMFGLRVEDEGNYTCLFVTFPQGSRSVDIWL

SEQ ID NO: 336 - protein, 116 aa, Artificial Sequence
  CD155 v5 IgV
PGTGDVVVQAPTQVLGFLGDSVTLPCYLQVPNMEVTHVSQLTWARHGESGSMAVFHQTQGPSYSESKRLEFVAARVGAELRNASLRMSGLRVEDEGNYTCLFVTFPQGSRSVDIWL

SEQ ID NO: 337 - protein, 116 aa, Artificial Sequence
  CD155 v6 IgV
PGTGDVVVQAPTQVSGFLGDSVTLPCYLQVPNMEVTHVSQLTWARHGESGSMAVFHQTQGPSYSESKRLEFVAARLGAELRNASLRMSGLRVEDEGNYTCLFVTFPQGSRSVDIWL

SEQ ID NO: 338 - protein, 116 aa, Artificial Sequence
  CD155 v7 IgV
PGTGDVVVQAPTQVTGFLGDSVTLPCYLQVPNMEVTHVSQLTWARHGESGSMAVFHQTQGPSYSESKRLEFVAARLGAELRNASLRMSGLRVEDEGNYTCLFVTFPQGSRSVDIWL

SEQ ID NO: 339 - protein, 116 aa, Artificial Sequence
  CD155 v8 IgV
PGTGDVVVQAPTQVTGFLGDSVTLPCYLQVPNMEVTHVPQLTWARHGESGSMAVFHQTQGPSYSESKRLEFVAARLGAELRNASLRMSGLRVEDEGNYTCLFVTFPQGSRSVDIWL

SEQ ID NO: 340 - protein, 116 aa, Artificial Sequence
  CD155 v9 IgV
PGTEDVVVQAPTQVTGFLGDSVTLPCCLQVPNMEVTHVSQLTWARHGESGSMAVFHQTQGPSYSESKRLEFVAARLGAELRNASLRMSGLRVEDEGNYTCLFVTFPQGSRSVDIWL

SEQ ID NO: 341 - protein, 116 aa, Artificial Sequence
  CD155 v10 IgV
PGTGDVVVQAPTQVTGFLGDSVTLPCYLQVPNMEVTHVSQLTWARHGESGSMAVFHQTQGPSYSESKRLEFVAARLGAELRNASLRMSGLRVEDEGNYTCLFVTFPQDSRSVDIWL

SEQ ID NO: 342 - protein, 116 aa, Artificial Sequence
  CD155 v11 IgV
PGTGDVVVQAPTQVSGFLGDSVTLPCYLQVPNMEVTHVSQLTWARHGESGSMAVFHQTQGPSYSESKRLEFVAARLGAELRNASLRMPGLRVEDEGNYTCLFVTFPQGSRSVDIWL

SEQ ID NO: 343 - protein, 116 aa, Artificial Sequence
  CD155 v12 IgV
PGTGDVVVQAPTQVTGFLGDSVTLPCYLQVPNMEVTHVSQLTWARHGESGSMAVFHQTQGPSYSESKRLEFVAARLGAELRNASLRMSGLRVEDEGNYTCLFVTLPQGSRSVDIWL

SEQ ID NO: 344 - protein, 116 aa, Artificial Sequence
  CD155 v14 IgV
PGTGDVVVQAPTQVTGFLGDSVTLPCYLQVPNMEVTHVSQLAWARHGESGSMAVFHQTQGPSYSESKRLEFVAARLGAELRNASLRMSGLRVEDEGNYTCLFVTFPQGSRSVDIWL

SEQ ID NO: 345 - protein, 116 aa, Artificial Sequence
  CD155 v15 IgV
PGTGDVVVQAPTQVTGFLGDSVTLPCYLQVPNMEVTHVSQLTWARHGESGSMAVFHQTQGPSYSESKRLEFVAARLGAELRNASLRMSGLHVEDEGNYTCLFVTFPQGSRSVDIWL

SEQ ID NO: 346 - protein, 116 aa, Artificial Sequence
  CD155 v16 IgV
PGTGDVVVQAPTQVSGFLGDSVTLPCCLQVPNMEVTHVSQLTWARHGESGSMAVFHQTQGPSYSESKRLEFVAARLGAELRNASLRMSGLRVEDEGNYTCLFVTFPQGSRSVDIWL

SEQ ID NO: 347 - protein, 116 aa, Artificial Sequence
  CD155 v17 IgV
PGTGDVVVQAPTQVPGFLGDSVTLPCYLQVPNMEVTHVSQLTWARHGESGSMAVFHQTQGPSYSESKRLEFVAARLGVEPRNASLRMFGLRVEDEGNYTCLFVTFPQGSRSVDIWL

SEQ ID NO: 348 - protein, 116 aa, Artificial Sequence
  CD155 v18 IgV
PGTGDVVVQAPTQVPGFLGDSVTLPCYLQVPNMEVTHVSQLTWARHGESGSMAVFHQTQGPSYSESKRLEFVAARLGAELRNASPRMFGLRVEDEGNYTCLFVTFPQGSRSVDIWL

SEQ ID NO: 349 - protein, 116 aa, Artificial Sequence
  CD155 v19 IgV
PGTGDVVVQAPTQVPGFLGDSVTLPCYLQVPNMEVTHVSQLTWARHGESGSMAVFHQTQGPSYSESKRLEFVAARLGAELRNASLRMFGLHVEDEGNYTCLFVTFPQGSRSVDIWL

SEQ ID NO: 350 - protein, 116 aa, Artificial Sequence
  CD155 v20 IgV
PGTGDVVVQEPTQVSGFLGDSVTLPCYLQVPNMEVTHVSQLTWARHGESGSMVVFHQTQGPSYSESKRLEFVAARLGAELRNASLRMSGLRVEDEGNYTCLFVTFPQGSRSVDIWL

SEQ ID NO: 351 - protein, 116 aa, Artificial Sequence
  CD155 v21 IgV
PGTGDVVVQAPTQVTGFLGDSVTLPCYLQVPNMEVTHVSQLTWARHGESGSMAVFHQTQGPSYSESKRLEFVAARLGAELRNASLRMSGLRVEDEGNYTCLFVTFPQGSRSADIWL

SEQ ID NO: 352 - protein, 116 aa, Artificial Sequence
  CD155 v22 IgV
PGTGDVVVQAPTQVTGFLGDSVTLPCYLQVPNMEVTHVSQLTWARHGESGSMAVFHKTQGPSYSESKRLEFVAARLGAELRNASLRMFGLRVEDEGNYTCLFVTFPQGSRSVDIWL

SEQ ID NO: 353 - protein, 122 aa, Homo sapiens
  MISC_FEATURE: CD155 IgV wildtype
WPPPGTGDVVVQAPTQVPGFLGDSVTLPCYLQVPNMEVTHVSQLTWARHGESGSMAVFHQTQGPSYSESKRLEFVAARLGAELRNASLRMFGLRVEDEGNYTCLFVTFPQGSRSVDIWLRVL

SEQ ID NO: 354 - protein, 122 aa, Artificial Sequence
  CD155 v1 IgV
WPPPGTGDVVVQAPTQVSGFLGDSVTLPCYLQVPNMEVTHVSQLTWARHGESGSMAVFHQTQGSSYSESKRLEFVAARLGAELRNASLRMSGLRVEDEGNYTCLFVTFPQGSRSVDIWLRVL

SEQ ID NO: 355 - protein, 122 aa, Artificial Sequence
  CD155 v2 IgV
WPPPGTGDVVVQAPTQVSGFLGDSVTLPCYLQVPNMEVTHVSQLTWARHGESGSMAVFHQTQGPSYSESKRLEFVAARLGAELRNASLRMSGLRVEDEGNYTCPFVTFPQGSRSVDIWLRVL

SEQ ID NO: 356 - protein, 122 aa, Artificial Sequence
  CD155 v3 IgV
WPPPGTGDVVVQAPTQVPGFLGDSVTLPCYLQVPNMEVTHVSQPTWARHGESGSMAVFHQTQGPSYSESKRLEFVAARLGAELRNASLRMFGLRVEDEGNYTCLFVTFPQGSRSVDIWLRVL

SEQ ID NO: 357 - protein, 122 aa, Artificial Sequence
  CD155 v4 IgV
WPPPGTGDVVVQAPTQVPGFLGDSVTLPCYLQVPNMEVTHVSQLTWARHGESGSMVVFHQTQGPSYSESKRLEFVAARLGAELRNASLRMFGLRVEDEGNYTCLFVTFPQGSRSVDIWLRVL

SEQ ID NO: 358 - protein, 122 aa, Artificial Sequence
  CD155 v5 IgV
WPPPGTGDVVVQAPTQVLGFLGDSVTLPCYLQVPNMEVTHVSQLTWARHGESGSMAVFHQTQGPSYSESKRLEFVAARVGAELRNASLRMSGLRVEDEGNYTCLFVTFPQGSRSVDIWLRVL

SEQ ID NO: 359 - protein, 122 aa, Artificial Sequence
  CD155 v6 IgV
WPPPGTGDVVVQAPTQVSGFLGDSVTLPCYLQVPNMEVTHVSQLTWARHGESGSMAVFHQTQGPSYSESKRLEFVAARLGAELRNASLRMSGLRVEDEGNYTCLFVTFPQGSRSVDIWLRVL

SEQ ID NO: 360 - protein, 122 aa, Artificial Sequence
  CD155 v7 IgV
WPPPGTGDVVVQAPTQVTGFLGDSVTLPCYLQVPNMEVTHVSQLTWARHGESGSMAVFHQTQGPSYSESKRLEFVAARLGAELRNASLRMSGLRVEDEGNYTCLFVTFPQGSRSVDIWLRVL

SEQ ID NO: 361 - protein, 122 aa, Artificial Sequence
  CD155 v8 IgV
WPPPGTGDVVVQAPTQVTGFLGDSVTLPCYLQVPNMEVTHVPQLTWARHGESGSMAVFHQTQGPSYSESKRLEFVAARLGAELRNASLRMSGLRVEDEGNYTCLFVTFPQGSRSVDIWLRVL

SEQ ID NO: 362 - protein, 122 aa, Artificial Sequence
  CD155 v9 IgV
WPPPGTEDVVVQAPTQVTGFLGDSVTLPCCLQVPNMEVTHVSQLTWARHGESGSMAVFHQTQGPSYSESKRLEFVAARLGAELRNASLRMSGLRVEDEGNYTCLFVTFPQGSRSVDIWLRVL

SEQ ID NO: 363 - protein, 122 aa, Artificial Sequence
  CD155 v10 IgV
WPPPGTGDVVVQAPTQVTGFLGDSVTLPCYLQVPNMEVTHVSQLTWARHGESGSMAVFHQTQGPSYSESKRLEFVAARLGAELRNASLRMSGLRVEDEGNYTCLFVTFPQDSRSVDIWLRVL

SEQ ID NO: 364 - protein, 122 aa, Artificial Sequence
  CD155 v11 IgV
WPPPGTGDVVVQAPTQVSGFLGDSVTLPCYLQVPNMEVTHVSQLTWARHGESGSMAVFHQTQGPSYSESKRLEFVAARLGAELRNASLRMPGLRVEDEGNYTCLFVTFPQGSRSVDIWLRVL

SEQ ID NO: 365 - protein, 122 aa, Artificial Sequence
  CD155 v12 IgV
WPPPGTGDVVVQAPTQVTGFLGDSVTLPCYLQVPNMEVTHVSQLTWARHGESGSMAVFHQTQGPSYSESKRLEFVAARLGAELRNASLRMSGLRVEDEGNYTCLFVTLPQGSRSVDIWLRVL

SEQ ID NO: 366 - protein, 122 aa, Artificial Sequence
  CD155 v14 IgV
WPPPGTGDVVVQAPTQVTGFLGDSVTLPCYLQVPNMEVTHVSQLAWARHGESGSMAVFHQTQGPSYSESKRLEFVAARLGAELRNASLRMSGLRVEDEGNYTCLFVTFPQGSRSVDIWLRVL

SEQ ID NO: 367 - protein, 122 aa, Artificial Sequence
  CD155 v15 IgV
WPPPGTGDVVVQAPTQVTGFLGDSVTLPCYLQVPNMEVTHVSQLTWARHGESGSMAVFHQTQGPSYSESKRLEFVAARLGAELRNASLRMSGLHVEDEGNYTCLFVTFPQGSRSVDIWLRVL

SEQ ID NO: 368 - protein, 122 aa, Artificial Sequence
  CD155 v16 IgV
WPPPGTGDVVVQAPTQVSGFLGDSVTLPCCLQVPNMEVTHVSQLTWARHGESGSMAVFHQTQGPSYSESKRLEFVAARLGAELRNASLRMSGLRVEDEGNYTCLFVTFPQGSRSVDIWLRVL

SEQ ID NO: 369 - protein, 122 aa, Artificial Sequence
  CD155 v17 IgV
WPPPGTGDVVVQAPTQVPGFLGDSVTLPCYLQVPNMEVTHVSQLTWARHGESGSMAVFHQTQGPSYSESKRLEFVAARLGVEPRNASLRMFGLRVEDEGNYTCLFVTFPQGSRSVDIWLRVL

SEQ ID NO: 370 - protein, 122 aa, Artificial Sequence
  CD155 v18 IgV
WPPPGTGDVVVQAPTQVPGFLGDSVTLPCYLQVPNMEVTHVSQLTWARHGESGSMAVFHQTQGPSYSESKRLEFVAARLGAELRNASPRMFGLRVEDEGNYTCLFVTFPQGSRSVDIWLRVL

SEQ ID NO: 371 - protein, 122 aa, Artificial Sequence
  CD155 v19 IgV
WPPPGTGDVVVQAPTQVPGFLGDSVTLPCYLQVPNMEVTHVSQLTWARHGESGSMAVFHQTQGPSYSESKRLEFVAARLGAELRNASLRMFGLHVEDEGNYTCLFVTFPQGSRSVDIWLRVL

SEQ ID NO: 372 - protein, 122 aa, Artificial Sequence
  CD155 v20 IgV
WPPPGTGDVVVQEPTQVSGFLGDSVTLPCYLQVPNMEVTHVSQLTWARHGESGSMVVFHQTQGPSYSESKRLEFVAARLGAELRNASLRMSGLRVEDEGNYTCLFVTFPQGSRSVDIWLRVL

SEQ ID NO: 373 - protein, 122 aa, Artificial Sequence
  CD155 v21 IgV
WPPPGTGDVVVQAPTQVTGFLGDSVTLPCYLQVPNMEVTHVSQLTWARHGESGSMAVFHQTQGPSYSESKRLEFVAARLGAELRNASLRMSGLRVEDEGNYTCLFVTFPQGSRSADIWLRVL

SEQ ID NO: 374 - protein, 122 aa, Artificial Sequence
  CD155 v22 IgV
WPPPGTGDVVVQAPTQVTGFLGDSVTLPCYLQVPNMEVTHVSQLTWARHGESGSMAVFHKTQGPSYSESKRLEFVAARLGAELRNASLRMFGLRVEDEGNYTCLFVTFPQGSRSVDIWLRVL

SEQ ID NO: 375 - protein, 323 aa, Artificial Sequence
  CD155 v23 ECD
WPPPGTGDVVVQAPTQVPGFLGDSVTLPCYLQVPNMEVTHVSQLTWARHGEMGSMAVFHQTQGPSYSESKRLEFVAARLGAELRNASLRMFGLRVEDEGNYTCLFVTFPQGSRSVDIWLRVLAKPQNTAEVQKVQLTGEPVPMARCVSTGGRPPAQITWHSDLGGMPNTSQVPGFLSGTVTVTSLWILVPSSQVDGKNVTCKVEHESFEKPQLLTVNLTVYYPPEVSISGYDNNWYLGQNEATLTCDARSNPEPTGYNWSTTMGPLPPFAVAQGAQLLIRPVDKPINTTLICNVTNALGARQAELTVQVKEGPPSEHSGISRN

SEQ ID NO: 376 - protein, 323 aa, Artificial Sequence
  CD155 v24 ECD
WPPPGTGDVVVQAPTQVPGFLGDSVTLPCYLQVPNMEVTHVSQLQWARHGELGSMAVFHQTQGPSYSESKRLEFVAARLGAELRNASLRMFGLRVEDEGNYTCEFVTFPQRSRSVDIWLRVLAKPQNTAEVQKVQLTGEPVPMARCVSTGGRPPAQITWHSDLGGMPNTSQVPGFLSGTVTVTSLWILVPSSQVDGKNVTCKVEHESFEKPQLLTVNLTVYYPPEVSISGYDNNWYLGQNEATLTCDARSNPEPTGYNWSTTMGPLPPFAVAQGAQLLIRPVDKPINTTLICNVTNALGARQAELTVQVKEGPPSEHSGISRN

SEQ ID NO: 377 - protein, 323 aa, Artificial Sequence
  CD155 v25 ECD
WPPPGTGDVVVQAPTQVPGFLGDSVTLPCYLQVPNMEVTHVGQLTWARHGESGSMAVFHQTQGPSYSESKRLEFVAARLGAELRNASLRMFGLRVEDEGNYTCLFVTFPQGSRSVDIWLRVLAKPQNTAEVQKVQLTGEPVPMARCVSTGGRPPAQITWHSDLGGMPNTSQVPGFLSGTVTVTSLWILVPSSQVDGKNVTCKVEHESFEKPQLLTVNLTVYYPPEVSISGYDNNWYLGQNEATLTCDARSNPEPTGYNWSTTMGPLPPFAVAQGAQLLIRPVDKPINTTLICNVTNALGARQAELTVQVKEGPPSEHSGISRN

SEQ ID NO: 378 - protein, 323 aa, Artificial Sequence
  CD155 v26 ECD
WPPPGTGDVVVQAPTQVPGFLGDSVTLPCYLQVPNMEVTHVSQLTWARHGESGSMAVFHQTFGPSYSESKRLEFVAARLGAELRNASLRMFGLRVEDEGNYTCLFVTFPQGSRSVDIWLRVLAKPQNTAEVQKVQLTGEPVPMARCVSTGGRPPAQITWHSDLGGMPNTSQVPGFLSGTVTVTSLWILVPSSQVDGKNVTCKVEHESFEKPQLLTVNLTVYYPPEVSISGYDNNWYLGQNEATLTCDARSNPEPTGYNWSTTMGPLPPFAVAQGAQLLIRPVDKPINTTLICNVTNALGARQAELTVQVKEGPPSEHSGISRN

SEQ ID NO: 379 - protein, 323 aa, Artificial Sequence
  CD155 v27 ECD
WPPPGTGDVVVQAPTQVPGFLGDSVTLPCYLQVPNMEVTHVSQLTWARHGEQGSMAVFHQTQGPSYSESKRLEFVAARLGAELRNASLRMFGLRVEDEGNYTCLFVTFPQGSRSVDIWLRVLAKPQNTAEVQKVQLTGEPVPMARCVSTGGRPPAQITWHSDLGGMPNTSQVPGFLSGTVTVTSLWILVPSSQVDGKNVTCKVEHESFEKPQLLTVNLTVYYPPEVSISGYDNNWYLGQNEATLTCDARSNPEPTGYNWSTTMGPLPPFAVAQGAQLLIRPVDKPINTTLICNVTNALGARQAELTVQVKEGPPSEHSGISRN

SEQ ID NO: 380 - protein, 323 aa, Artificial Sequence
  CD155 v28 ECD
WPPPGTGDVVVQAPTQVPGFLGDSVTLPCYLQVPNMEVTHVAQLTWARHGESGSMAVFHQTQGPSYSESKRLEFVAARLGAELRNASLRMFGLRVEDEGNYTCQFVTFPQRSRSVDIWLRVLAKPQNTAEVQKVQLTGEPVPMARCVSTGGRPPAQITWHSDLGGMPNTSQVPGFLSGTVTVTSLWILVPSSQVDGKNVTCKVEHESFEKPQLLTVNLTVYYPPEVSISGYDNNWYLGQNEATLTCDARSNPEPTGYNWSTTMGPLPPFAVAQGAQLLIRPVDKPINTTLICNVTNALGARQAELTVQVKEGPPSEHSGISRN

SEQ ID NO: 381 - protein, 323 aa, Artificial Sequence
  CD155 v39 ECD
WPPPGTGDVVVQAPTQVPGFLGDSVTLPCYLQVPNMEVTHVAQLTWARHGEQGSMAVFHQTQGPSYSESKRLEFVAARLGAELRNASLRMFGLRVEDEGNYTCQFVTFPQRSRSVDIWLRVLAKPQNTAEVQKVQLTGEPVPMARCVSTGGRPPAQITWHSDLGGMPNTSQVPGFLSGTVTVTSLWILVPSSQVDGKNVTCKVEHESFEKPQLLTVNLTVYYPPEVSISGYDNNWYLGQNEATLTCDARSNPEPTGYNWSTTMGPLPPFAVAQGAQLLIRPVDKPINTTLICNVTNALGARQAELTVQVKEGPPSEHSGISRN

SEQ ID NO: 382 - protein, 323 aa, Artificial Sequence
  CD155 v30 ECD
WPPPGTGDVVVQAPTQVPGFLGDSVTLPCYLQVPNMEVTHVSQLTWARHGEWGSMAVFHQTQGPSYSESKRLEFVAARLGAELRNASLRMFGLRVEDEGNYTCEFVTFPQGSRSVDIWLRVLAKPQNTAEVQKVQLTGEPVPMARCVSTGGRPPAQITWHSDLGGMPNTSQVPGFLSGTVTVTSLWILVPSSQVDGKNVTCKVEHESFEKPQLLTVNLTVYYPPEVSISGYDNNWYLGQNEATLTCDARSNPEPTGYNWSTTMGPLPPFAVAQGAQLLIRPVDKPINTTLICNVTNALGARQAELTVQVKEGPPSEHSGISRN

SEQ ID NO: 383 - protein, 323 aa, Artificial Sequence
  CD155 v31 ECD
WPPPGTGDVVVQAPTQVPGFLGDSVTLPCYLQVPNMEVTHVCQLTWARHGESGSMAVFHQTQGPSYSESKRLEFVAARLGAELRNASLRMFGLRVEDEGNYTCLFVTFPQGSRSVDIWLRVLAKPQNTAEVQKVQLTGEPVPMARCVSTGGRPPAQITWHSDLGGMPNTSQVPGFLSGTVTVTSLWILVPSSQVDGKNVTCKVEHESFEKPQLLTVNLTVYYPPEVSISGYDNNWYLGQNEATLTCDARSNPEPTGYNWSTTMGPLPPFAVAQGAQLLIRPVDKPINTTLICNVTNALGARQAELTVQVKEGPPSEHSGISRN

SEQ ID NO: 384 - protein, 323 aa, Artificial Sequence
  CD155 v32 ECD
WPPPGTGDVVVQAPTQVPGFLGDSVTLPCYLQVPNMEVTHVSQLTWARHGEWGSMAVFHQTQGPSYSESKRLEFVAARLGAELRNASLRMFGLRVEDEGNYTCLFVTFPQGSRSVDIWLRVLAKPQNTAEVQKVQLTGEPVPMARCVSTGGRPPAQITWHSDLGGMPNTSQVPGFLSGTVTVTSLWILVPSSQVDGKNVTCKVEHESFEKPQLLTVNLTVYYPPEVSISGYDNNWYLGQNEATLTCDARSNPEPTGYNWSTTMGPLPPFAVAQGAQLLIRPVDKPINTTLICNVTNALGARQAELTVQVKEGPPSEHSGISRN

SEQ ID NO: 385 - protein, 323 aa, Artificial Sequence
  CD155 v33 ECD
WPPPGTGDVVVQAPTQVPGFLGDSVTLPCYLQVPNMEVTHVSQLTWARHGEMGSMAVFHQTQGPSYSESKRLEFVAARLGAELRNASLRMFGLRVEDEGNYTCQFVTFPQGSRSVDIWLRVLAKPQNTAEVQKVQLTGEPVPMARCVSTGGRPPAQITWHSDLGGMPNTSQVPGFLSGTVTVTSLWILVPSSQVDGKNVTCKVEHESFEKPQLLTVNLTVYYPPEVSISGYDNNWYLGQNEATLTCDARSNPEPTGYNWSTTMGPLPPFAVAQGAQLLIRPVDKPINTTLICNVTNALGARQAELTVQVKEGPPSEHSGISRN

SEQ ID NO: 386 - protein, 323 aa, Artificial Sequence
  CD155 v34 ECD
WPPPGTGDVVVQAPTQVPGFLGDSVTLPCYLQVPNMEVTHVLQLTWARHGELGSMAVFHQTFGPSYSESKRLEFVAARLGAELRNASLRMFGLRVEDEGNYTCQFVTFPQGSRSVDIWLRVLAKPQNTAEVQKVQLTGEPVPMARCVSTGGRPPAQITWHSDLGGMPNTSQVPGFLSGTVTVTSLWILVPSSQVDGKNVTCKVEHESFEKPQLLTVNLTVYYPPEVSISGYDNNWYLGQNEATLTCDARSNPEPTGYNWSTTMGPLPPFAVAQGAQLLIRPVDKPINTTLICNVTNALGARQAELTVQVKEGPPSEHSGISRN

SEQ ID NO: 387 - protein, 323 aa, Artificial Sequence
  CD155 v35 ECD
WPPPGTGDVVVQAPTQVPGFLGDSVTLPCYLQVPNMEVTHVWQLTWARHGESGSMAVFHQTQGPSYSESKRLEFVAARLGAELRNASLRMFGLRVEDEGNYTCLFVTFPQGSRSVDIWLRVLAKPQNTAEVQKVQLTGEPVPMARCVSTGGRPPAQITWHSDLGGMPNTSQVPGFLSGTVTVTSLWILVPSSQVDGKNVTCKVEHESFEKPQLLTVNLTVYYPPEVSISGYDNNWYLGQNEATLTCDARSNPEPTGYNWSTTMGPLPPFAVAQGAQLLIRPVDKPINTTLICNVTNALGARQAELTVQVKEGPPSEHSGISRN

SEQ ID NO: 388 - protein, 323 aa, Artificial Sequence
  CD155 v36 ECD
WPPPGTGDVVVQAPTQVPGFLGDSVTLPCYLQVPNMEVTHVQQLTWARHGESGSMAVFHQTQGPSYSESKRLEFVAARLGAELRNASLRMFGLRVEDEGNYTCLFVTFPQGSRSVDIWLRVLAKPQNTAEVQKVQLTGEPVPMARCVSTGGRPPAQITWHSDLGGMPNTSQVPGFLSGTVTVTSLWILVPSSQVDGKNVTCKVEHESFEKPQLLTVNLTVYYPPEVSISGYDNNWYLGQNEATLTCDARSNPEPTGYNWSTTMGPLPPFAVAQGAQLLIRPVDKPINTTLICNVTNALGARQAELTVQVKEGPPSEHSGISRN

SEQ ID NO: 389 - protein, 323 aa, Artificial Sequence
  CD155 v37 ECD
WPPPGTGDVVVQAPTQVPGFLGDSVTLPCYLQVPNMEVTHVSQLTWARHGELGSMAVFHQTQGPSYSESKRLEFVAARLGAELRNASLRMFGLRVEDEGNYTCLFVTFPQGSRSVDIWLRVLAKPQNTAEVQKVQLTGEPVPMARCVSTGGRPPAQITWHSDLGGMPNTSQVPGFLSGTVTVTSLWILVPSSQVDGKNVTCKVEHESFEKPQLLTVNLTVYYPPEVSISGYDNNWYLGQNEATLTCDARSNPEPTGYNWSTTMGPLPPFAVAQGAQLLIRPVDKPINTTLICNVTNALGARQAELTVQVKEGPPSEHSGISRN

SEQ ID NO: 390 - protein, 323 aa, Artificial Sequence
  CD155 v38 ECD
WPPPGTGDVVVQAPTQVPGFLGDSVTLPCYLQVPNMEVTHVSQLTWARHGERGSMAVFHQTQGPSYSESKRLEFVAARLGAELRNASLRMFGLRVEDEGNYTCLFVTFPQGSRSVDIWLRVLAKPQNTAEVQKVQLTGEPVPMARCVSTGGRPPAQITWHSDLGGMPNTSQVPGFLSGTVTVTSLWILVPSSQVDGKNVTCKVEHESFEKPQLLTVNLTVYYPPEVSISGYDNNWYLGQNEATLTCDARSNPEPTGYNWSTTMGPLPPFAVAQGAQLLIRPVDKPINTTLICNVTNALGARQAELTVQVKEGPPSEHSGISRN

SEQ ID NO: 391 - protein, 323 aa, Artificial Sequence
  CD155 v39 ECD
WPPPGTGDVVVQAPTQVPGFLGDSVTLPCYLQVPNMEVTHVSQLTWARHGESGSMAVFHQTQGPSYSESKRLEFVAARLGAELRNASLRMFGLRVEDEGNYTCEFVTFPQGSRSVDIWLRVLAKPQNTAEVQKVQLTGEPVPMARCVSTGGRPPAQITWHSDLGGMPNTSQVPGFLSGTVTVTSLWILVPSSQVDGKNVTCKVEHESFEKPQLLTVNLTVYYPPEVSISGYDNNWYLGQNEATLTCDARSNPEPTGYNWSTTMGPLPPFAVAQGAQLLIRPVDKPINTTLICNVTNALGARQAELTVQVKEGPPSEHSGISRN

SEQ ID NO: 392 - protein, 323 aa, Artificial Sequence
  CD155 v40 ECD
WPPPGTGDVVVQAPTQVPGFLGDSVTLPCYLQVPNMEVTHVSQLTWARHGESGSMAVFHQTQGPSYSESKRLEFVAARLGAELRNASLRMFGLRVEDEGNYTCLFVTFPQRSRSVDIWLRVLAKPQNTAEVQKVQLTGEPVPMARCVSTGGRPPAQITWHSDLGGMPNTSQVPGFLSGTVTVTSLWILVPSSQVDGKNVTCKVEHESFEKPQLLTVNLTVYYPPEVSISGYDNNWYLGQNEATLTCDARSNPEPTGYNWSTTMGPLPPFAVAQGAQLLIRPVDKPINTTLICNVTNALGARQAELTVQVKEGPPSEHSGISRN

SEQ ID NO: 393 - protein, 323 aa, Artificial Sequence
  CD155 v41 ECD
WPPPGTGDVVVQAPTQVPGFLGDSVTLPCYLQVPNMEVTHVSQLTWARHGEEGSMAVFHQTQGPSYSESKRLEFVAARLGAELRNASLRMFGLRVEDEGNYTCLFVTFPQGSRSVDIWLRVLAKPQNTAEVQKVQLTGEPVPMARCVSTGGRPPAQITWHSDLGGMPNTSQVPGFLSGTVTVTSLWILVPSSQVDGKNVTCKVEHESFEKPQLLTVNLTVYYPPEVSISGYDNNWYLGQNEATLTCDARSNPEPTGYNWSTTMGPLPPFAVAQGAQLLIRPVDKPINTTLICNVTNALGARQAELTVQVKEGPPSEHSGISRN

SEQ ID NO: 394 - protein, 323 aa, Artificial Sequence
  CD155 v42 ECD
WPPPGTGDVVVQAPTQVPGFLGDSVTLPCYLQVPNMEVTHVSQLTWARHGESGSMAVFHQTYGPSYSESKRLEFVAARLGAELRNASLRMFGLRVEDEGNYTCLFVTFPQGSRSVDIWLRVLAKPQNTAEVQKVQLTGEPVPMARCVSTGGRPPAQITWHSDLGGMPNTSQVPGFLSGTVTVTSLWILVPSSQVDGKNVTCKVEHESFEKPQLLTVNLTVYYPPEVSISGYDNNWYLGQNEATLTCDARSNPEPTGYNWSTTMGPLPPFAVAQGAQLLIRPVDKPINTTLICNVTNALGARQAELTVQVKEGPPSEHSGISRN

SEQ ID NO: 395 - protein, 323 aa, Artificial Sequence
  CD155 v43 ECD
WPPPGTGDVVVQAPTQVPGFLGDSVTLPCYLQVPNMEVTHVSQLQWARHGEMGSMAVFHQTQGPSYSESKRLEFVAARLGAELRNASLRMFGLRVEDEGNYTCEFVTFPQGSRSVDIWLRVLAKPQNTAEVQKVQLTGEPVPMARCVSTGGRPPAQITWHSDLGGMPNTSQVPGFLSGTVTVTSLWILVPSSQVDGKNVTCKVEHESFEKPQLLTVNLTVYYPPEVSISGYDNNWYLGQNEATLTCDARSNPEPTGYNWSTTMGPLPPFAVAQGAQLLIRPVDKPINTTLICNVTNALGARQAELTVQVKEGPPSEHSGISRN

SEQ ID NO: 396 - protein, 323 aa, Artificial Sequence
  CD155 v44 ECD
WPPPGTGDVVVQAPTQVPGFLGDSVTLPCYLQVPNMEVTHVNQLTWARHGESGSMAVFHQTQGPSYSESKRLEFVAARLGAELRNASLRMFGLRVEDEGNYTCQFVTFPQRSRSVDIWLRVLAKPQNTAEVQKVQLTGEPVPMARCVSTGGRPPAQITWHSDLGGMPNTSQVPGFLSGTVTVTSLWILVPSSQVDGKNVTCKVEHESFEKPQLLTVNLTVYYPPEVSISGYDNNWYLGQNEATLTCDARSNPEPTGYNWSTTMGPLPPFAVAQGAQLLIRPVDKPINTTLICNVTNALGARQAELTVQVKEGPPSEHSGISRN

SEQ ID NO: 397 - protein, 323 aa, Artificial Sequence
  CD155 v45 ECD
WPPPGTGDVVVQAPTQVPGFLGDSVTLPCYLQVPNMEVTHVSQLTWARHGEMGSMALFHQTQGPSYSESKRLEFVAARLGAELRNASLRMFGLRVEDEGNYTCLFVTFPQGSRSVDIWLRVLAKPQNTAEVQKVQLTGEPVPMARCVSTGGRPPAQITWHSDLGGMPNTSQVPGFLSGTVTVTSLWILVPSSQVDGKNVTCKVEHESFEKPQLLTVNLTVYYPPEVSISGYDNNWYLGQNEATLTCDARSNPEPTGYNWSTTMGPLPPFAVAQGAQLLIRPVDKPINTTLICNVTNALGARQAELTVQVKEGPPSEHSGISRN

SEQ ID NO: 398 - protein, 323 aa, Artificial Sequence
  CD155 v46 ECD
WPPPGTGDVVVQAPTQVPGFLGDSVTLPCYLQVPNMEVTHVNQLTWARHGEQGSMAVFHQTFGPSYSESKRLEFVAARLGAELRNASLRMFGLRVEDEGNYTCLFVTFPQGSRSVDIWLRVLAKPQNTAEVQKVQLTGEPVPMARCVSTGGRPPAQITWHSDLGGMPNTSQVPGFLSGTVTVTSLWILVPSSQVDGKNVTCKVEHESFEKPQLLTVNLTVYYPPEVSISGYDNNWYLGQNEATLTCDARSNPEPTGYNWSTTMGPLPPFAVAQGAQLLIRPVDKPINTTLICNVTNALGARQAELTVQVKEGPPSEHSGISRN

SEQ ID NO: 399 - protein, 323 aa, Artificial Sequence
  CD155 v47 ECD
WPPPGTGDVVVQAPTQVPGFLGDSVTLPCYLQVPNMEVTHVAQLTWARHGELGSMAVFHQTQGPSYSESKRLEFVAARLGAELRNASLRMFGLRVEDEGNYTCEFVTFPQRSRSVDIWLRVLAKPQNTAEVQKVQLTGEPVPMARCVSTGGRPPAQITWHSDLGGMPNTSQVPGFLSGTVTVTSLWILVPSSQVDGKNVTCKVEHESFEKPQLLTVNLTVYYPPEVSISGYDNNWYLGQNEATLTCDARSNPEPTGYNWSTTMGPLPPFAVAQGAQLLIRPVDKPINTTLICNVTNALGARQAELTVQVKEGPPSEHSGISRN

SEQ ID NO: 400 - protein, 323 aa, Artificial Sequence
  CD155 v48 ECD
WPPPGTGDVVVQAPTQVPGFLGDSVTLPCYLQVPNMEVTHVWQLTWARHGEQGSMALFHQTYGPSYSESKRLEFVAARLGAELRNASLRMFGLRVEDEGNYTCLFVTFPQGSRSVDIWLRVLAKPQNTAEVQKVQLTGEPVPMARCVSTGGRPPAQITWHSDLGGMPNTSQVPGFLSGTVTVTSLWILVPSSQVDGKNVTCKVEHESFEKPQLLTVNLTVYYPPEVSISGYDNNWYLGQNEATLTCDARSNPEPTGYNWSTTMGPLPPFAVAQGAQLLIRPVDKPINTTLICNVTNALGARQAELTVQVKEGPPSEHSGISRN

SEQ ID NO: 401 - protein, 323 aa, Artificial Sequence
  CD155 v49 ECD
WPPPGTGDVVVQAPTQVPGFLGDSVTLPCYLQVPNMEVTHVSQLTWARHGESGSMAVFHQTQGPSYSESKRLEFVAARLGAELRNASLRMFGLRVEDEGNYTCQFVTFPQGSRSVDIWLRVLAKPQNTAEVQKVQLTGEPVPMARCVSTGGRPPAQITWHSDLGGMPNTSQVPGFLSGTVTVTSLWILVPSSQVDGKNVTCKVEHESFEKPQLLTVNLTVYYPPEVSISGYDNNWYLGQNEATLTCDARSNPEPTGYNWSTTMGPLPPFAVAQGAQLLIRPVDKPINTTLICNVTNALGARQAELTVQVKEGPPSEHSGISRN

SEQ ID NO: 402 - protein, 323 aa, Artificial Sequence
  CD155 v50 ECD
WPPPGTGDVVVQAPTQVPGFLGDSVTLPCYLQVPNMEVTHVLQLTWARHGEQGSMAVFHQTQGPSYSESKRLEFVAARLGAELRNASLRMFGLRVEDEGNYTCEFVTFPQGSRSVDIWLRVLAKPQNTAEVQKVQLTGEPVPMARCVSTGGRPPAQITWHSDLGGMPNTSQVPGFLSGTVTVTSLWILVPSSQVDGKNVTCKVEHESFEKPQLLTVNLTVYYPPEVSISGYDNNWYLGQNEATLTCDARSNPEPTGYNWSTTMGPLPPFAVAQGAQLLIRPVDKPINTTLICNVTNALGARQAELTVQVKEGPPSEHSGISRN

SEQ ID NO: 403 - protein, 323 aa, Artificial Sequence
  CD155 v51 ECD
WPPPGTGDVVVQAPTQVPGFLGDSVTLPCYLQVPNMEVTHVCQLTWARHGELGSMAVFHQTQGPSYSESKRLEFVAARLGAELRNASLRMFGLRVEDEGNYTCLFVTFPQGSRSVDIWLRVLAKPQNTAEVQKVQLTGEPVPMARCVSTGGRPPAQITWHSDLGGMPNTSQVPGFLSGTVTVTSLWILVPSSQVDGKNVTCKVEHESFEKPQLLTVNLTVYYPPEVSISGYDNNWYLGQNEATLTCDARSNPEPTGYNWSTTMGPLPPFAVAQGAQLLIRPVDKPINTTLICNVTNALGARQAELTVQVKEGPPSEHSGISRN

SEQ ID NO: 404 - protein, 323 aa, Artificial Sequence
  CD155 v52 ECD
WPPPGTGDVVVQAPTQVPGFLGDSVTLPCYLQVPNMEVTHVWQLTWARHGERGSMAVFHQTYGPSYSESKRLEFVAARLGAELRNASLRMFGLRVEDEGNYTCQFVTFPQGSRSVDIWLRVLAKPQNTAEVQKVQLTGEPVPMARCVSTGGRPPAQITWHSDLGGMPNTSQVPGFLSGTVTVTSLWILVPSSQVDGKNVTCKVEHESFEKPQLLTVNLTVYYPPEVSISGYDNNWYLGQNEATLTCDARSNPEPTGYNWSTTMGPLPPFAVAQGAQLLIRPVDKPINTTLICNVTNALGARQAELTVQVKEGPPSEHSGISRN

SEQ ID NO: 405 - protein, 323 aa, Artificial Sequence
  CD155 v53 ECD
WPPPGTGDVVVQAPTQVPGFLGDSVTLPCYLQVPNMEVTHVSQLQWARHGERGSMAVFHQTQGPSYSESKRLEFVAARLGAELRNASLRMFGLRVEDEGNYTCEFVTFPQGSRSVDIWLRVLAKPQNTAEVQKVQLTGEPVPMARCVSTGGRPPAQITWHSDLGGMPNTSQVPGFLSGTVTVTSLWILVPSSQVDGKNVTCKVEHESFEKPQLLTVNLTVYYPPEVSISGYDNNWYLGQNEATLTCDARSNPEPTGYNWSTTMGPLPPFAVAQGAQLLIRPVDKPINTTLICNVTNALGARQAELTVQVKEGPPSEHSGISRN

SEQ ID NO: 406 - protein, 323 aa, Artificial Sequence
  CD155 v54 ECD
WPPPGTGDVVVQAPTQVPGFLGDSVTLPCYLQVPNMEVTHVSQLTWARHGERGSMAVFHQTFGPSYSESKRLEFVAARLGAELRNASLRMFGLRVEDEGNYTCQFVTFPQRSRSVDIWLRVLAKPQNTAEVQKVQLTGEPVPMARCVSTGGRPPAQITWHSDLGGMPNTSQVPGFLSGTVTVTSLWILVPSSQVDGKNVTCKVEHESFEKPQLLTVNLTVYYPPEVSISGYDNNWYLGQNEATLTCDARSNPEPTGYNWSTTMGPLPPFAVAQGAQLLIRPVDKPINTTLICNVTNALGARQAELTVQVKEGPPSEHSGISRN

SEQ ID NO: 407 - protein, 323 aa, Artificial Sequence
  CD155 v55 ECD
WPPPGTGDVVVQAPTQVPGFLGDSVTLPCYLQVPNMEVTHVSQLQWARHGELGSMALFHQTQGPSYSESKRLEFVAARLGAELRNASLRMFGLRVEDEGNYTCEFVTFPQGSRSVDIWLRVLAKPQNTAEVQKVQLTGEPVPMARCVSTGGRPPAQITWHSDLGGMPNTSQVPGFLSGTVTVTSLWILVPSSQVDGKNVTCKVEHESFEKPQLLTVNLTVYYPPEVSISGYDNNWYLGQNEATLTCDARSNPEPTGYNWSTTMGPLPPFAVAQGAQLLIRPVDKPINTTLICNVTNALGARQAELTVQVKEGPPSEHSGISRN

SEQ ID NO: 408 - protein, 323 aa, Artificial Sequence
  CD155 v56 ECD
WPPPGTGDVVVQAPTQVPGFLGDSVTLPCYLQVPNMEVTHVSQLTWARHGEMGSMAVFHQTYGPSYSESKRLEFVAARLGAELRNASLRMFGLRVEDEGNYTCLFVTFPQGSRSVDIWLRVLAKPQNTAEVQKVQLTGEPVPMARCVSTGGRPPAQITWHSDLGGMPNTSQVPGFLSGTVTVTSLWILVPSSQVDGKNVTCKVEHESFEKPQLLTVNLTVYYPPEVSISGYDNNWYLGQNEATLTCDARSNPEPTGYNWSTTMGPLPPFAVAQGAQLLIRPVDKPINTTLICNVTNALGARQAELTVQVKEGPPSEHSGISRN

SEQ ID NO: 409 - protein, 323 aa, Artificial Sequence
  CD155 v57 ECD
WPPPGTGDVVVQAPTQVPGFLGDSVTLPCYLQVPNMEVTHVSQLTWARHGESGSMAVFHQTFGPSYSESKRLEFVAARLGAELRNASLRMFGLRVEDEGNYTCEFVTFPQRSRSVDIWLRVLAKPQNTAEVQKVQLTGEPVPMARCVSTGGRPPAQITWHSDLGGMPNTSQVPGFLSGTVTVTSLWILVPSSQVDGKNVTCKVEHESFEKPQLLTVNLTVYYPPEVSISGYDNNWYLGQNEATLTCDARSNPEPTGYNWSTTMGPLPPFAVAQGAQLLIRPVDKPINTTLICNVTNALGARQAELTVQVKEGPPSEHSGISRN

SEQ ID NO: 410 - protein, 323 aa, Artificial Sequence
  CD155 v58 ECD
WPPPGTGDVVVQAPTQVPGFLGDSVTLPCYLQVPNMEVTHVSQLQWARHGEQGSMAVFHQTQGPSYSESKRLEFVAARLGAELRNASLRMFGLRVEDEGNYTCLFVTFPQGSRSVDIWLRVLAKPQNTAEVQKVQLTGEPVPMARCVSTGGRPPAQITWHSDLGGMPNTSQVPGFLSGTVTVTSLWILVPSSQVDGKNVTCKVEHESFEKPQLLTVNLTVYYPPEVSISGYDNNWYLGQNEATLTCDARSNPEPTGYNWSTTMGPLPPFAVAQGAQLLIRPVDKPINTTLICNVTNALGARQAELTVQVKEGPPSEHSGISRN

SEQ ID NO: 411 - protein, 323 aa, Artificial Sequence
  CD155 v59 ECD
WPPPGTGDVVVQAPTQVPGFLGDSVTLPCYLQVPNMEVTHVSQLTWARHGELGSMAVFHQTQGPSYSESKRLEFVAARLGAELRNASLRMFGLRVEDEGNYTCEFVTFPQGSRSVDIWLRVLAKPQNTAEVQKVQLTGEPVPMARCVSTGGRPPAQITWHSDLGGMPNTSQVPGFLSGTVTVTSLWILVPSSQVDGKNVTCKVEHESFEKPQLLTVNLTVYYPPEVSISGYDNNWYLGQNEATLTCDARSNPEPTGYNWSTTMGPLPPFAVAQGAQLLIRPVDKPINTTLICNVTNALGARQAELTVQVKEGPPSEHSGISRN

SEQ ID NO: 412 - protein, 323 aa, Artificial Sequence
  CD155 v60 ECD
WPPPGTGDVVVQAPTQVPGFLGDSVTLPCYLQVPNMEVTHVVQLTWARHGEEGSMAVFHQTQGPSYSESKRLEFVAARLGAELRNASLRMFGLRVEDEGNYTCLFVTFPQGSRSVDIWLRVLAKPQNTAEVQKVQLTGEPVPMARCVSTGGRPPAQITWHSDLGGMPNTSQVPGFLSGTVTVTSLWILVPSSQVDGKNVTCKVEHESFEKPQLLTVNLTVYYPPEVSISGYDNNWYLGQNEATLTCDARSNPEPTGYNWSTTMGPLPPFAVAQGAQLLIRPVDKPINTTLICNVTNALGARQAELTVQVKEGPPSEHSGISRN

SEQ ID NO: 413 - protein, 323 aa, Artificial Sequence
  CD155 v61 ECD
WPPPGTGDVVVQAPTQVPGFLGDSVTLPCYLQVPNMEVTHVSQLQWARHGERGSMAVFHQTQGPSYSESKRLEFVAARLGAELRNASLRMFGLRVEDEGNYTCLFVTFPQRSRSVDIWLRVLAKPQNTAEVQKVQLTGEPVPMARCVSTGGRPPAQITWHSDLGGMPNTSQVPGFLSGTVTVTSLWILVPSSQVDGKNVTCKVEHESFEKPQLLTVNLTVYYPPEVSISGYDNNWYLGQNEATLTCDARSNPEPTGYNWSTTMGPLPPFAVAQGAQLLIRPVDKPINTTLICNVTNALGARQAELTVQVKEGPPSEHSGISRN

SEQ ID NO: 414 - protein, 323 aa, Artificial Sequence
  CD155 v62 ECD
WPPPGTGDVVVQAPTQVPGFLGDSVTLPCYLQVPNMEVTHVGQLTWARHGEQGSMAVFHQTQGPSYSESKRLEFVAARLGAELRNASLRMFGLRVEDEGNYTCEFVTFPQRSRSVDIWLRVLAKPQNTAEVQKVQLTGEPVPMARCVSTGGRPPAQITWHSDLGGMPNTSQVPGFLSGTVTVTSLWILVPSSQVDGKNVTCKVEHESFEKPQLLTVNLTVYYPPEVSISGYDNNWYLGQNEATLTCDARSNPEPTGYNWSTTMGPLPPFAVAQGAQLLIRPVDKPINTTLICNVTNALGARQAELTVQVKEGPPSEHSGISRN

SEQ ID NO: 415 - protein, 323 aa, Artificial Sequence
  CD155 v63 ECD
WPPPGTGDVVVQAPTQVPGFLGDSVTLPCYLQVPNMEVTHVNQLTWARHGEEGSMALFHQTQGPSYSESKRLEFVAARLGAELRNASLRMFGLRVEDEGNYTCEFVTFPQGSRSVDIWLRVLAKPQNTAEVQKVQLTGEPVPMARCVSTGGRPPAQITWHSDLGGMPNTSQVPGFLSGTVTVTSLWILVPSSQVDGKNVTCKVEHESFEKPQLLTVNLTVYYPPEVSISGYDNNWYLGQNEATLTCDARSNPEPTGYNWSTTMGPLPPFAVAQGAQLLIRPVDKPINTTLICNVTNALGARQAELTVQVKEGPPSEHSGISRN

SEQ ID NO: 416 - protein, 323 aa, Artificial Sequence
  CD155 v64 ECD
WPPPGTGDVVVQAPTQVPGFLGDSVTLPCYLQVPNMEVTHVCQLTWARHGEMGSMAVFHQTFGPSYSESKRLEFVAARLGAELRNASLRMFGLRVEDEGNYTCLFVTFPQGSRSVDIWLRVLAKPQNTAEVQKVQLTGEPVPMARCVSTGGRPPAQITWHSDLGGMPNTSQVPGFLSGTVTVTSLWILVPSSQVDGKNVTCKVEHESFEKPQLLTVNLTVYYPPEVSISGYDNNWYLGQNEATLTCDARSNPEPTGYNWSTTMGPLPPFAVAQGAQLLIRPVDKPINTTLICNVTNALGARQAELTVQVKEGPPSEHSGISRN

SEQ ID NO: 417 - protein, 323 aa, Artificial Sequence
  CD155 v65 ECD
WPPPGTGDVVVQAPTQVPGFLGDSVTLPCYLQVPNMEVTHVLQLTWARHGESGSMAVFHQTQGPSYSESKRLEFVAARLGAELRNASLRMFGLRVEDEGNYTCLFVTFPQGSRSVDIWLRVLAKPQNTAEVQKVQLTGEPVPMARCVSTGGRPPAQITWHSDLGGMPNTSQVPGFLSGTVTVTSLWILVPSSQVDGKNVTCKVEHESFEKPQLLTVNLTVYYPPEVSISGYDNNWYLGQNEATLTCDARSNPEPTGYNWSTTMGPLPPFAVAQGAQLLIRPVDKPINTTLICNVTNALGARQAELTVQVKEGPPSEHSGISRN

SEQ ID NO: 418 - protein, 323 aa, Artificial Sequence
  CD155 v66 ECD
WPPPGTGDVVVQAPTQVPGFLGDSVTLPCYLQVPNMEVTHVAQLTWARHGESGSMAVFHQTQGPSYSESKRLEFVAARLGAELRNASLRMFGLRVEDEGNYTCLFVTFPQGSRSVDIWLRVLAKPQNTAEVQKVQLTGEPVPMARCVSTGGRPPAQITWHSDLGGMPNTSQVPGFLSGTVTVTSLWILVPSSQVDGKNVTCKVEHESFEKPQLLTVNLTVYYPPEVSISGYDNNWYLGQNEATLTCDARSNPEPTGYNWSTTMGPLPPFAVAQGAQLLIRPVDKPINTTLICNVTNALGARQAELTVQVKEGPPSEHSGISRN

SEQ ID NO: 419 - protein, 323 aa, Artificial Sequence
  CD155 v67 ECD
WPPPGTGDVVVQAPTQVPGFLGDSVTLPCYLQVPNMEVTHVGQLTWARHGELGSMAVFHQTFGPSYSESKRLEFVAARLGAELRNASLRMFGLRVEDEGNYTCQFVTFPQGSRSVDIWLRVLAKPQNTAEVQKVQLTGEPVPMARCVSTGGRPPAQITWHSDLGGMPNTSQVPGFLSGTVTVTSLWILVPSSQVDGKNVTCKVEHESFEKPQLLTVNLTVYYPPEVSISGYDNNWYLGQNEATLTCDARSNPEPTGYNWSTTMGPLPPFAVAQGAQLLIRPVDKPINTTLICNVTNALGARQAELTVQVKEGPPSEHSGISRN

SEQ ID NO: 420 - protein, 323 aa, Artificial Sequence
  CD155 v68 ECD
WPPPGTGDVVVQAPTQVPGFLGDSVTLPCYLQVPNMEVTHVNQLTWARHGESGSMAVFHQTQGPSYSESKRLEFVAARLGAELRNASLRMFGLRVEDEGNYTCLFVTFPQGSRSVDIWLRVLAKPQNTAEVQKVQLTGEPVPMARCVSTGGRPPAQITWHSDLGGMPNTSQVPGFLSGTVTVTSLWILVPSSQVDGKNVTCKVEHESFEKPQLLTVNLTVYYPPEVSISGYDNNWYLGQNEATLTCDARSNPEPTGYNWSTTMGPLPPFAVAQGAQLLIRPVDKPINTTLICNVTNALGARQAELTVQVKEGPPSEHSGISRN

SEQ ID NO: 421 - protein, 323 aa, Artificial Sequence
  CD155 v69 ECD
WPPPGTGDVVVQAPTQVTGFLGDSVTLPCYLQVPNMEVTHVSQLTWARHGESGSMAVFHQTQGPAYVESKRLEFVAARLGAELRNASLRMSGLRVEDEGNYTCLFVTFPQGSRSVDIWLRVLAKPQNTAEVQKVQLTGEPVPMARCVSTGGRPPAQITWHSDLGGMPNTSQVPGFLSGTVTVTSLWILVPSSQVDGKNVTCKVEHESFEKPQLLTVNLTVYYPPEVSISGYDNNWYLGQNEATLTCDARSNPEPTGYNWSTTMGPLPPFAVAQGAQLLIRPVDKPINTTLICNVTNALGARQAELTVQVKEGPPSEHSGISRN

SEQ ID NO: 422 - protein, 323 aa, Artificial Sequence
  CD155 v70 ECD
WPPPGTGDVVVQAPTQVFGFLGDSVTLPCYLQVPNMEVAHVSQLQWARHGESGSMAVFHQRQGPNYLESKRLGFVAAGLGAELRNASLRMFGLRVEDEGNYTCLFVTFPQGSRSVDIWLRVLAKPQNTAEVQKVQLTGEPVPMARCVSTGGRPPAQITWHSDLGGMPNTSQVPGFLSGTVTVTSLWILVPSSQVDGKNVTCKVEHESFEKPQLLTVNLTVYYPPEVSISGYDNNWYLGQNEATLTCDARSNPEPTGYNWSTTMGPLPPFAVAQGAQLLIRPVDKPINTTLICNVTNALGARQAELTVQVKEGPPSEHSGISRN

SEQ ID NO: 423 - protein, 323 aa, Artificial Sequence
  CD155 v71 ECD
WPPPGTGDVVVQAPTQVTGFLGDSVTLPCYLQVPNMEVTHVSQLQWARHGESGSMAVFHQRQGPNYLESKRLEFVAARLGAELRNASLRMFGLRVEDEGNYTCLFVTFPQGSRSVDIWLRVLAKPQNTAEVQKVQLTGEPVPMARCVSTGGRPPAQITWHSDLGGMPNTSQVPGFLSGTVTVTSLWILVPSSQVDGKNVTCKVEHESFEKPQLLTVNLTVYYPPEVSISGYDNNWYLGQNEATLTCDARSNPEPTGYNWSTTMGPLPPFAVAQGAQLLIRPVDKPINTTLICNVTNALGARQAELTVQVKEGPPSEHSGISRN

SEQ ID NO: 424 - protein, 323 aa, Artificial Sequence
  CD155 v72 ECD
WPPPGTGDVVVQAPTQVFGFLGDSVTLPCYLQVPNMEVTHVSQLTWARHGESGSMAVFHQTQGPAYVESKRLEFVAARLGAELRNASLRMSGLRVEDEGNYTCLFVTFPQGSRSVDIWLRVLAKPQNTAEVQKVQLTGEPVPMARCVSTGGRPPAQITWHSDLGGMPNTSQVPGFLSGTVTVTSLWILVPSSQVDGKNVTCKVEHESFEKPQLLTVNLTVYYPPEVSISGYDNNWYLGQNEATLTCDARSNPEPTGYNWSTTMGPLPPFAVAQGAQLLIRPVDKPINTTLICNVTNALGARQAELTVQVKEGPPSEHSGISRN

SEQ ID NO: 425 - protein, 323 aa, Artificial Sequence
  CD155 v73 ECD
WPPPGTGDVVVQAPTQVFGFLGDSVTLPCYLQVPNMEVTHVSQLQWARHGESGSMAVFHQRQGPNYLESKRLEFVAARLGAELRNASLRMSGLRVEDEGNYTCPFVTFPQGSRSVDIWLRVLAKPQNTAEVQKVQLTGEPVPMARCVSTGGRPPAQITWHSDLGGMPNTSQVPGFLSGTVTVTSLWILVPSSQVDGKNVTCKVEHESFEKPQLLTVNLTVYYPPEVSISGYDNNWYLGQNEATLTCDARSNPEPTGYNWSTTMGPLPPFAVAQGAQLLIRPVDKPINTTLICNVTNALGARQAELTVQVKEGPPSEHSGISRN

SEQ ID NO: 426 - protein, 323 aa, Artificial Sequence
  CD155 v74 ECD
WPPPGTGDVVVQAPTQVSGFLGDSVTLPCYLQVPNMEVTHVSQLTWARHGESGSMAVFHQTQGPSYSESKRLEFVAARPGAELRNASLRMFGLRVEDEGNYTCMFVTFPQGSRSVDIWLRVLAKPQNTAEVQKVQLTGEPVPMARCVSTGGRPPAQITWHSDLGGMPNTSQVPGFLSGTVTVTSLWILVPSSQVDGKNVTCKVEHESFEKPQLLTVNLTVYYPPEVSISGYDNNWYLGQNEATLTCDARSNPEPTGYNWSTTMGPLPPFAVAQGAQLLIRPVDKPINTTLICNVTNALGARQAELTVQVKEGPPSEHSGISRN

SEQ ID NO: 427 - protein, 323 aa, Artificial Sequence
  CD155 v75 ECD
WPPPGTGDVVVQAPTQVSGFLGDSVTLPCYLQVPNMEVTHVSQLTWARHGESGSMAVFHQTQGPSYSESKRLEFVAARLGAELRNASLRMFGLRVEDEGNYTCMFVTFPQGSRSVDIWLRVLAKPQNTAEVQKVQLTGEPVPMARCVSTGGRPPAQITWHSDLGGMPNTSQVPGFLSGTVTVTSLWILVPSSQVDGKNVTCKVEHESFEKPQLLTVNLTVYYPPEVSISGYDNNWYLGQNEATLTCDARSNPEPTGYNWSTTMGPLPPFAVAQGAQLLIRPVDKPINTTLICNVTNALGARQAELTVQVKEGPPSEHSGISRN

SEQ ID NO: 428 - protein, 323 aa, Artificial Sequence
  CD155 v76 ECD
WPPPGTGDVVVQAPTQVPGFLGDSVTLPCYLQVPNMEVTHVSQLTWARHGESGSMAVFHQTQGPSYSESKRLEFVAARPGAELRNASLRMFGLRVEDEGNYTCMFVTFPQGSRSVDIWLRVLAKPQNTAEVQKVQLTGEPVPMARCVSTGGRPPAQITWHSDLGGMPNTSQVPGFLSGTVTVTSLWILVPSSQVDGKNVTCKVEHESFEKPQLLTVNLTVYYPPEVSISGYDNNWYLGQNEATLTCDARSNPEPTGYNWSTTMGPLPPFAVAQGAQLLIRPVDKPINTTLICNVTNALGARQAELTVQVKEGPPSEHSGISRN

SEQ ID NO: 429 - protein, 323 aa, Artificial Sequence
  CD155 v77 ECD
WPPPGTGDVVVQAPTQVTGFLGDSVTLPCYLQVPNMEVTHVSQLQWARHGESGSMAVFHQTQGPSYSESKRLEFVAARPGAELRNASLRMFGLRVEDEGNYTCLFVTFPQGSRSVDIWLRVLAKPQNTAEVQKVQLTGEPVPMARCVSTGGRPPAQITWHSDLGGMPNTSQVPGFLSGTVTVTSLWILVPSSQVDGKNVTCKVEHESFEKPQLLTVNLTVYYPPEVSISGYDNNWYLGQNEATLTCDARSNPEPTGYNWSTTMGPLPPFAVAQGAQLLIRPVDKPINTTLICNVTNALGARQAELTVQVKEGPPSEHSGISRN

SEQ ID NO: 430 - protein, 323 aa, Artificial Sequence
  CD155 v78 ECD
WPPPGTGDVVVQAPTQVTGFLGDSVTLPCYLQVPNMEVTHVSQLQWARHGESGSMAVFHQRQGPHYHESKRLEFVAARLGAELRNASLRMFGLRVEDEGNYTCLFVTFPQGSRSVDIWLRVLAKPQNTAEVQKVQLTGEPVPMARCVSTGGRPPAQITWHSDLGGMPNTSQVPGFLSGTVTVTSLWILVPSSQVDGKNVTCKVEHESFEKPQLLTVNLTVYYPPEVSISGYDNNWYLGQNEATLTCDARSNPEPTGYNWSTTMGPLPPFAVAQGAQLLIRPVDKPINTTLICNVTNALGARQAELTVQVKEGPPSEHSGISRN

SEQ ID NO: 431 - protein, 323 aa, Artificial Sequence
  CD155 v79 ECD
WPPPGTGDVVVQAPTQVTGFLGDSVTLPCYLQVPNMEVTHVSQLTWARHGESGSMAVFHQTQGPSYSESKRLEFVAARLGEELRNASLRMFGLRVEDEGNYTCLFVTFPQGSRSVDIWLRVLAKPQNTAEVQKVQLTGEPVPMARCVSTGGRPPAQITWHSDLGGMPNTSQVPGFLSGTVTVTSLWILVPSSQVDGKNVTCKVEHESFEKPQLLTVNLTVYYPPEVSISGYDNNWYLGQNEATLTCDARSNPEPTGYNWSTTMGPLPPFAVAQGAQLLIRPVDKPINTTLICNVTNALGARQAELTVQVKEGPPSEHSGISRN

SEQ ID NO: 432 - protein, 323 aa, Artificial Sequence
  CD155 v80 ECD
WPPPGTGDVVVQAPTQVSGFLGYSVTLPCYLQVPNMPVTHVSQLTWARHGEGGSMAVFHQTMGPSYSESKRLEFVAARLSPELRNASLRMFGLRVEDEYNYTCLFVTFPQGNRSVDIWLRVLAKPQNTAEVQKVQLTGEPVPMARCVSTGGRPPAQITWHSDLGGMPNTSQVPGFLSGTVTVTSLWILVPSSQVDGKNVTCKVEHESFEKPQLLTVNLTVYYPPEVSISGYDNNWYLGQNEATLTCDARSNPEPTGYNWSTTMGPLPPFAVAQGAQLLIRPVDKPINTTLICNVTNALGARQAELTVQVKEGPPSEHSGISRN

SEQ ID NO: 433 - protein, 323 aa, Artificial Sequence
  CD155 v81 ECD
WPPPGTGDVVVQRPTQVPGFLGYSVTLPCYLQVPNMPVTHVPQLTWARHGESGSMAVFHQTYGPSYSESKRLEFVAARLGEELRNASLRMFGLRVEDEGNYTCLFVTFPQGSRSVDIWLRVLAKPQNTAEVQKVQLTGEPVPMARCVSTGGRPPAQITWHSDLGGMPNTSQVPGFLSGTVTVTSLWILVPSSQVDGKNVTCKVEHESFEKPQLLTVNLTVYYPPEVSISGYDNNWYLGQNEATLTCDARSNPEPTGYNWSTTMGPLPPFAVAQGAQLLIRPVDKPINTTLICNVTNALGARQAELTVQVKEGPPSEHSGISRN

SEQ ID NO: 434 - protein, 323 aa, Artificial Sequence
  CD155 v82 ECD
WPPPGTGDVVVQRPTQVPGFLGYSVTLPCYLQVPNMPVTHVSQLTWARHGESGSMAVFHQTQGPSYSESKRLEFVAARLGAELRNASLRMFGLRVEDEYNYTCLFVTFPQGNRSVDIWLRVLAKPQNTAEVQKVQLTGEPVPMARCVSTGGRPPAQITWHSDLGGMPNTSQVPGFLSGTVTVTSLWILVPSSQVDGKNVTCKVEHESFEKPQLLTVNLTVYYPPEVSISGYDNNWYLGQNEATLTCDARSNPEPTGYNWSTTMGPLPPFAVAQGAQLLIRPVDKPINTTLICNVTNALGARQAELTVQVKEGPPSEHSGISRN

SEQ ID NO: 435 - protein, 323 aa, Artificial Sequence
  CD155 v83 ECD
WPPPGTGDVVVQRPTQVPGFLGYSVTLPCYLQVPNMPVTHVSQLTWARHGESGSMAVFHQTMGPSYSESKRLEFVAVRLSPELRNASLRMFGLRVEDEYNYTCLFVTFPQGSRSVDIWLRVLAKPQNTAEVQKVQLTGEPVPMARCVSTGGRPPAQITWHSDLGGMPNTSQVPGFLSGTVTVTSLWILVPSSQVDGKNVTCKVEHESFEKPQLLTVNLTVYYPPEVSISGYDNNWYLGQNEATLTCDARSNPEPTGYNWSTTMGPLPPFAVAQGAQLLIRPVDKPINTTLICNVTNALGARQAELTVQVKEGPPSEHSGISRN

SEQ ID NO: 436 - protein, 323 aa, Artificial Sequence
  CD155 v84 ECD
WPPPGTGDVVVQAPTQVLGFLGDSVTLPCYLQVPNMSVTHVSQLTWARHGESGSMAVFHQTMGPSYSESKRLEFVAARLSPELRNASLRMFGLRVEDEYNYTCLFVTFPQGNRSVDIWLRVLAKPQNTAEVQKVQLTGEPVPMARCVSTGGRPPAQITWHSDLGGMPNTSQVPGFLSGTVTVTSLWILVPSSQVDGKNVTCKVEHESFEKPQLLTVNLTVYYPPEVSISGYDNNWYLGQNEATLTCDARSNPEPTGYNWSTTMGPLPPFAVAQGAQLLIRPVDKPINTTLICNVTNALGARQAELTVQVKEGPPSEHSGISRN

SEQ ID NO: 437 - protein, 323 aa, Artificial Sequence
  CD155 v85 ECD
WPPPGTGDVVVQAPTQVSGFLGDSVTLPCYLQVPNMEVTHVSQLTWARHGESGSMAVFHQTQGPSYSESKRLEFVAARLGAELRNASLRMFGLRVEDEGNYTCTFVTFPQGSRSVDIWLRVLAKPQNTAEVQKVQLTGEPVPMARCVSTGGRPPAQITWHSDLGGMPNTSQVPGFLSGTVTVTSLWILVPSSQVDGKNVTCKVEHESFEKPQLLTVNLTVYYPPEVSISGYDNNWYLGQNEATLTCDARSNPEPTGYNWSTTMGPLPPFAVAQGAQLLIRPVDKPINTTLICNVTNALGARQAELTVQVKEGPPSEHSGISRN

SEQ ID NO: 438 - protein, 323 aa, Artificial Sequence
  CD155 v86 ECD
WPPPGTGDVVVQAPTQVSGFLGDSVTLPCYLQVPNMEVTHVSQLTWARHGESGSMAVFHQTHGPSYSESKRLEFVAARQGAELRNASLRMSGLRVEDEGNYTCLFVTFPQGSRSVDIWLRVLAKPQNTAEVQKVQLTGEPVPMARCVSTGGRPPAQITWHSDLGGMPNTSQVPGFLSGTVTVTSLWILVPSSQVDGKNVTCKVEHESFEKPQLLTVNLTVYYPPEVSISGYDNNWYLGQNEATLTCDARSNPEPTGYNWSTTMGPLPPFAVAQGAQLLIRPVDKPINTTLICNVTNALGARQAELTVQVKEGPPSEHSGISRN

SEQ ID NO: 439 - protein, 323 aa, Artificial Sequence
  CD155 v87 ECD
WPPPGTGDVVVQAPTQVPGFLGDSVTLPCYLQVPNMEVTHVSQLQWARHGEKGSMAVFHQTFGPSYSESKRLEFVAARLGAELRNASLRMFGLRVEDEGNYTCQFVTFPQRSRSVDIWLRVLAKPQNTAEVQKVQLTGEPVPMARCVSTGGRPPAQITWHSDLGGMPNTSQVPGFLSGTVTVTSLWILVPSSQVDGKNVTCKVEHESFEKPQLLTVNLTVYYPPEVSISGYDNNWYLGQNEATLTCDARSNPEPTGYNWSTTMGPLPPFAVAQGAQLLIRPVDKPINTTLICNVTNALGARQAELTVQVKEGPPSEHSGISRN

SEQ ID NO: 440 - protein, 323 aa, Artificial Sequence
  CD155 v88 ECD
WPPPGTGDVVVQAPTQVPGFLGDSVTLPCYLQVPNMEVTHVSQLQWARHGEQGSMAVFHQTYGPSYSESKRLEFVAARLGAELRNASLRMFGLRVEDEGNYTCQFVTFPQRSRSVDIWLRVLAKPQNTAEVQKVQLTGEPVPMARCVSTGGRPPAQITWHSDLGGMPNTSQVPGFLSGTVTVTSLWILVPSSQVDGKNVTCKVEHESFEKPQLLTVNLTVYYPPEVSISGYDNNWYLGQNEATLTCDARSNPEPTGYNWSTTMGPLPPFAVAQGAQLLIRPVDKPINTTLICNVTNALGARQAELTVQVKEGPPSEHSGISRN

SEQ ID NO: 441 - protein, 323 aa, Artificial Sequence
  CD155 v89 ECD
WPPPGTGDVVVQAPTQVPGFLGDSVTLPCYLQVPNMEVTHVSQLQWARHGEQGSMAVFHQTYGPSYSESKRLEFVAARLGAELRNASLRMFGLRVEDEGNYTCEFVTFPQRSRSVDIWLRVLAKPQNTAEVQKVQLTGEPVPMARCVSTGGRPPAQITWHSDLGGMPNTSQVPGFLSGTVTVTSLWILVPSSQVDGKNVTCKVEHESFEKPQLLTVNLTVYYPPEVSISGYDNNWYLGQNEATLTCDARSNPEPTGYNWSTTMGPLPPFAVAQGAQLLIRPVDKPINTTLICNVTNALGARQAELTVQVKEGPPSEHSGISRN

SEQ ID NO: 442 - protein, 323 aa, Artificial Sequence
  CD155 v90 ECD
WPPPGTGDVVVQAPTQVPGFLGDSVTLPCYLQVPNMEVTHVSQLTWARHGESGSMAAFHQMQGPWYAESKRLEFVAARLGAELRNASLRMFGLRVDDEGNYTCTFVTFPQGSRSVDIWLRVLAKPQNTAEVQKVQLTGEPVPMARCVSTGGRPPAQITWHSDLGGMPNTSQVPGFLSGTVTVTSLWILVPSSQVDGKNVTCKVEHESFEKPQLLTVNLTVYYPPEVSISGYDNNWYLGQNEATLTCDARSNPEPTGYNWSTTMGPLPPFAVAQGAQLLIRPVDKPINTTLICNVTNALGARQAELTVQVKEGPPSEHSGISRN

SEQ ID NO: 443 - protein, 323 aa, Artificial Sequence
  CD155 v91 ECD
WPPPGTGDVVVQAPTQVLGFLGDSVTLPCYLQVPNMEVTHVSQLTWARHGESGSMATFHQSQGPYYAESKRLEFVAARLGAELRNASLRMFGLRVEDEGNYTCTFVTFPQGSRSVDIWLRVLAKPQNTAEVQKVQLTGEPVPMARCVSTGGRPPAQITWHSDLGGMPNTSQVPGFLSGTVTVTSLWILVPSSQVDGKNVTCKVEHESFEKPQLLTVNLTVYYPPEVSISGYDNNWYLGQNEATLTCDARSNPEPTGYNWSTTMGPLPPFAVAQGAQLLIRPVDKPINTTLICNVTNALGARQAELTVQVKEGPPSEHSGISRN

SEQ ID NO: 444 - protein, 323 aa, Artificial Sequence
  CD155 v92 ECD
WPPPGTGDVVVQAPTQVTGFLGDSVTLPCYLQVPNMEVTHVSQLQWARHGESGSMAVFHQTQGPSYSESKRLEFVAARLGAELRNASLRMFGLRVEDEGNYTCLFVTFPQGSRSVDIWLRVLAKPQNTAEVQKVQLTGEPVPMARCVSTGGRPPAQITWHSDLGGMPNTSQVPGFLSGTVTVTSLWILVPSSQVDGKNVTCKVEHESFEKPQLLTVNLTVYYPPEVSISGYDNNWYLGQNEATLTCDARSNPEPTGYNWSTTMGPLPPFAVAQGAQLLIRPVDKPINTTLICNVTNALGARQAELTVQVKEGPPSEHSGISRN

SEQ ID NO: 445 - protein, 323 aa, Artificial Sequence
  CD155 v94 ECD
WPPPGTGDVVVQAPTQVLGFLGDSVTLPCYLQVPNMEVTHVSQLTWARHGESGSMAAFHQMQGPWYAESKRLEFVAARLGAELRNASLRMFGLRVEDEGNYTCTFVTFPQGSRSVDIWLRVLAKPQNTAEVQKVQLTGEPVPMARCVSTGGRPPAQITWHSDLGGMPNTSQVPGFLSGTVTVTSLWILVPSSQVDGKNVTCKVEHESFEKPQLLTVNLTVYYPPEVSISGYDNNWYLGQNEATLTCDARSNPEPTGYNWSTTMGPLPPFAVAQGAQLLIRPVDKPINTTLICNVTNALGARQAELTVQVKEGPPSEHSGISRN

SEQ ID NO: 446 - protein, 323 aa, Artificial Sequence
  CD155 v94 ECD
WPPPGTGDVVVQAPTQVPGFLGDSVTLPCYLQVPNMEVTHVSQLTWARHGESGSMAVFHQMQGPWYAESKRLEFVAARLGAELRNASLRMFGLRVEDEGNYTCTFVTFPQGSRSVDIWLRVLAKPQNTAEVQKVQLTGEPVPMARCVSTGGRPPAQITWHSDLGGMPNTSQVPGFLSGTVTVTSLWILVPSSQVDGKNVTCKVEHESFEKPQLLTVNLTVYYPPEVSISGYDNNWYLGQNEATLTCDARSNPEPTGYNWSTTMGPLPPFAVAQGAQLLIRPVDKPINTTLICNVTNALGARQAELTVQVKEGPPSEHSGISRN

SEQ ID NO: 447 - protein, 323 aa, Artificial Sequence
  CD155 v94 ECD
WPPPGTGDVVVQAPTQVSGFLGDSVTLPCYLQVPNMEVTHAGQLGWARHGESGSMAVFHQTQGPSYSESKRLEFVAARLGAELRNASLRMFGLRVEDEGNYTCNFVTFPQGSRSVDIWLRVLAKPQNTAEVQKVQLTGEPVPMARCVSTGGRPPAQITWHSDLGGMPNTSQVPGFLSGTVTVTSLWILVPSSQVDGKNVTCKVEHESFEKPQLLTVNLTVYYPPEVSISGYDNNWYLGQNEATLTCDARSNPEPTGYNWSTTMGPLPPFAVAQGAQLLIRPVDKPINTTLICNVTNALGARQAELTVQVKEGPPSEHSGISRN

SEQ ID NO: 448 - protein, 323 aa, Artificial Sequence
  CD155 v96 ECD
WPPPGTGDVVVQAPTQVHGFLGDSVTLPCYLQVPNMEVTHVGQLIWARHGETRHMALFEQSQGPDYSGSKRLEFVAARLGAELRNASLRMFGLRVEDEGNYTCNFVTFPQGSRSVDIWLRVLAKPQNTAEVQKVQLTGEPVPMARCVSTGGRPPAQITWHSDLGGMPNTSQVPGFLSGTVTVTSLWILVPSSQVDGKNVTCKVEHESFEKPQLLTVNLTVYYPPEVSISGYDNNWYLGQNEATLTCDARSNPEPTGYNWSTTMGPLPPFAVAQGAQLLIRPVDKPINTTLICNVTNALGARQAELTVQVKEGPPSEHSGISRN

SEQ ID NO: 449 - protein, 323 aa, Artificial Sequence
  CD155 v97 ECD
WPPPGTGDVVVQAPTQVSGFLGDSVTLPCYLQVPNMEVTHVGQLVWARHGESGSMAVLHQTQGPSYWESKRLEFVAARLGAELRNASLRMFGLRVEDEGNYTCNFVTFPQGSRSVDIWLRVLAKPQNTAEVQKVQLTGEPVPMARCVSTGGRPPAQITWHSDLGGMPNTSQVPGFLSGTVTVTSLWILVPSSQVDGKNVTCKVEHESFEKPQLLTVNLTVYYPPEVSISGYDNNWYLGQNEATLTCDARSNPEPTGYNWSTTMGPLPPFAVAQGAQLLIRPVDKPINTTLICNVTNALGARQAELTVQVKEGPPSEHSGISRN

SEQ ID NO: 450 - protein, 323 aa, Artificial Sequence
  CD155 v98 ECD
WPPPGTGDVVVQAPTQVSGFLGDSVTLPCYLQVPNMEVTHVSQLIWARHGESGSMAVFHQTQGPSYSESKRLEFVAARLGAELRNASLRMFGLRVEDEGNYTCNFVTFPQGSRSVDIWLRVLAKPQNTAEVQKVQLTGEPVPMARCVSTGGRPPAQITWHSDLGGMPNTSQVPGFLSGTVTVTSLWILVPSSQVDGKNVTCKVEHESFEKPQLLTVNLTVYYPPEVSISGYDNNWYLGQNEATLTCDARSNPEPTGYNWSTTMGPLPPFAVAQGAQLLIRPVDKPINTTLICNVTNALGARQAELTVQVKEGPPSEHSGISRN

SEQ ID NO: 451 - protein, 323 aa, Artificial Sequence
  CD155 v99 ECD
WPPPGTGDVVVQAPTQVSGFLGDSVTLPCYLQVPNMEVTHVGQLGWARHGESGSMAVFHQTQGPSYSESKRLEFVAARLGAELRNASLRMFGLRVEDEGNYTCNFATFPQGSRSVDIWLRVLAKPQNTAEVQKVQLTGEPVPMARCVSTGGRPPAQITWHSDLGGMPNTSQVPGFLSGTVTVTSLWILVPSSQVDGKNVTCKVEHESFEKPQLLTVNLTVYYPPEVSISGYDNNWYLGQNEATLTCDARSNPEPTGYNWSTTMGPLPPFAVAQGAQLLIRPVDKPINTTLICNVTNALGARQAELTVQVKEGPPSEHSGISRN

SEQ ID NO: 452 - protein, 323 aa, Artificial Sequence
  CD155 v100 ECD
WPPPGTGDVVVQAPTQVHGFLGDSVTLPCYLQVPNMEVTRVGQLIWARHGETRHMALFEQSQGPDYSGSKRLEFVAARLGAELRNASLRMFGLRVEDEGNYTCYFLTHPQGSRSVDIWLRVLAKPQNTAEVQKVQLTGEPVPMARCVSTGGRPPAQITWHSDLGGMPNTSQVPGFLSGTVTVTSLWILVPSSQVDGKNVTCKVEHESFEKPQLLTVNLTVYYPPEVSISGYDNNWYLGQNEATLTCDARSNPEPTGYNWSTTMGPLPPFAVAQGAQLLIRPVDKPINTTLICNVTNALGARQAELTVQVKEGPPSEHSGISRN

SEQ ID NO: 453 - protein, 323 aa, Artificial Sequence
  CD155 v101 ECD
WPPPGTGDVVVQAPTQVPGFLGDSVTLPCYLQVPNMVVTHVGQLGWARHGESGSMAVFHQTQGPSYSESKRLEFVAARLGAELRNASLRMFGLRVEDEGNYTCNFVTFPQGSRSVDIWLRVLAKPQNTAEVQKVQLTGEPVPMARCVSTGGRPPAQITWHSDLGGMPNTSQVPGFLSGTVTVTSLWILVPSSQVDGKNVTCKVEHESFEKPQLLTVNLTVYYPPEVSISGYDNNWYLGQNEATLTCDARSNPEPTGYNWSTTMGPLPPFAVAQGAQLLIRPVDKPINTTLICNVTNALGARQAELTVQVKEGPPSEHSGISRN

SEQ ID NO: 454 - protein, 323 aa, Artificial Sequence
  CD155 v102 ECD
WPPPGTGDVVVQAPTQVSGFLGDSVTLPCYLQVPNMEVTHVSQLQWARHGESGSMAVFHQTQGPSYSESKRLEFVAARPGAELRNASLRMFGLRVEDEGNYTCTFVTFPQGSRSVDIWLRVLAKPQNTAEVQKVQLTGEPVPMARCVSTGGRPPAQITWHSDLGGMPNTSQVPGFLSGTVTVTSLWILVPSSQVDGKNVTCKVEHESFEKPQLLTVNLTVYYPPEVSISGYDNNWYLGQNEATLTCDARSNPEPTGYNWSTTMGPLPPFAVAQGAQLLIRPVDKPINTTLICNVTNALGARQAELTVQVKEGPPSEHSGISRN

SEQ ID NO: 455 - protein, 323 aa, Artificial Sequence
  CD155 v103 ECD
WPPPGTGDVVVQAPTQVLGFLGDSVTLPCYLQVPNMEVTHVSQLTWARHGESGSMAVFHQTRGPSYSESKRLEFVAARLGAELRNASLRMFGLRVEDEGNYTCLFVTFPQGSRSVDIWLRVLAKPQNTAEVQKVQLTGEPVPMARCVSTGGRPPAQITWHSDLGGMPNTSQVPGFLSGTVTVTSLWILVPSSQVDGKNVTCKVEHESFEKPQLLTVNLTVYYPPEVSISGYDNNWYLGQNEATLTCDARSNPEPTGYNWSTTMGPLPPFAVAQGAQLLIRPVDKPINTTLICNVTNALGARQAELTVQVKEGPPSEHSGISRN

SEQ ID NO: 456 - protein, 323 aa, Artificial Sequence
  CD155 v104 ECD
WPPPGTGDVVVQRPTQVPGFLGYSVTLPCYLQVPNMPVTHVLQLTWARHGEGGSMAVFHQTYGPSYSESKRLEFVAARLGEELRNASLRMFGLRVEDEGNYTCLFVTFPQGSRSVDIWLRVLAKPQNTAEVQKVQLTGEPVPMARCVSTGGRPPAQITWHSDLGGMPNTSQVPGFLSGTVTVTSLWILVPSSQVDGKNVTCKVEHESFEKPQLLTVNLTVYYPPEVSISGYDNNWYLGQNEATLTCDARSNPEPTGYNWSTTMGPLPPFAVAQGAQLLIRPVDKPINTTLICNVTNALGARQAELTVQVKEGPPSEHSGISRN

SEQ ID NO: 457 - protein, 323 aa, Artificial Sequence
  CD155 v105 ECD
WPPPGTGDVVVQAPTQVLGFLGDSVTLPCYLQVPNMEVTHVSQLTWARRGESGSMAVFHQTQGPSYSESKRLEFVAARLGAELRNASLRMFGLRVEDEGNYTCTFVTFPQGSRSVNIWLRVLAKPQNTAEVQKVQLTGEPVPMARCVSTGGRPPAQITWHSDLGGMPNTSQVPGFLSGTVTVTSLWILVPSSQVDGKNVTCKVEHESFEKPQLLTVNLTVYYPPEVSISGYDNNWYLGQNEATLTCDARSNPEPTGYNWSTTMGPLPPFAVAQGAQLLIRPVDKPINTTLICNVTNALGARQAELTVQVKEGPPSEHSGISRN

SEQ ID NO: 458 - protein, 323 aa, Artificial Sequence
  CD155 v106 ECD
WPPPGTGDVVVQRPTQVPGFLGYSVTLPCYLQVPNMPVTHVSQLTWARHGESGSMAVFHQTMGPSYSESKRLEFVAARLSPELRNASLRMFGLRVEDEGNYTCTFVTFPQGSRSVDIWLRVLAKPQNTAEVQKVQLTGEPVPMARCVSTGGRPPAQITWHSDLGGMPNTSQVPGFLSGTVTVTSLWILVPSSQVDGKNVTCKVEHESFEKPQLLTVNLTVYYPPEVSISGYDNNWYLGQNEATLTCDARSNPEPTGYNWSTTMGPLPPFAVAQGAQLLIRPVDKPINTTLICNVTNALGARQAELTVQVKEGPPSEHSGISRN

SEQ ID NO: 459 - protein, 323 aa, Artificial Sequence
  CD155 v107 ECD
WPPPGTGDVVVQAPTQVPGFLGDSVTLPCYLQVPNMEVTHVSQLTWARHGESGSMAVFHQTQGPTYSESKRLEFVAARLGAELRNASLRMFGLRVEDEGNYTCTFVTFPQGSRSVDIWLRVLAKPQNTAEVQKVQLTGEPVPMARCVSTGGRPPAQITWHSDLGGMPNTSQVPGFLSGTVTVTSLWILVPSSQVDGKNVTCKVEHESFEKPQLLTVNLTVYYPPEVSISGYDNNWYLGQNEATLTCDARSNPEPTGYNWSTTMGPLPPFAVAQGAQLLIRPVDKPINTTLICNVTNALGARQAELTVQVKEGPPSEHSGISRN

SEQ ID NO: 460 - protein, 323 aa, Artificial Sequence
  CD155 v108 ECD
WPPPGTGDVVVQRPTQVPGFLGYSVTLPCYLQVPNMPVTHVSQLTWARHGEGGSMAAFHQTMGPSYSESERLEFVAARLGAELRNASLRMFGLRVEDEGNYTCTFVTFPQGSRSVDIWLRVLAKPQNTAEVQKVQLTGEPVPMARCVSTGGRPPAQITWHSDLGGMPNTSQVPGFLSGTVTVTSLWILVPSSQVDGKNVTCKVEHESFEKPQLLTVNLTVYYPPEVSISGYDNNWYLGQNEATLTCDARSNPEPTGYNWSTTMGPLPPFAVAQGAQLLIRPVDKPINTTLICNVTNALGARQAELTVQVKEGPPSEHSGISRN

SEQ ID NO: 461 - protein, 323 aa, Artificial Sequence
  CD155 v109 ECD
WPPPGTGDVVVQAPTQVLGFLGDSVTLPCYLQVPNMEVTHVSQLTWVRHGESGSMAVFHQTYGPSYSESKRLDFVAARLGAELRNASLRMFGLRVEDEGNYTCTFVTFPQGSRSVDIWLRVLAKPQNTAEVQKVQLTGEPVPMARCVSTGGRPPAQITWHSDLGGMPNTSQVPGFLSGTVTVTSLWILVPSSQVDGKNVTCKVEHESFEKPQLLTVNLTVYYPPEVSISGYDNNWYLGQNEATLTCDARSNPEPTGYNWSTTMGPLPPFAVAQGAQLLIRPVDKPINTTLICNVTNALGARQAELTVQVKEGPPSEHSGISRN

SEQ ID NO: 462 - protein, 323 aa, Artificial Sequence
  CD155 v110 ECD
WPPPGTGDVVVQAPTQVPGFLGDSVTLPCYLQVPNMEVTTMSQLTWVRHGEQGSMAVFHQTLGPTYSESKRLRFVAARLGAELRNASLRMFGLRVEGSGNYTCTFVTFPQGSRSVNIWLRVLAKPQNTAEVQKVQLTGEPVPMARCVSTGGRPPAQITWHSDLGGMPNTSQVPGFLSGTVTVTSLWILVPSSQVDGKNVTCKVEHESFEKPQLLTVNLTVYYPPEVSISGYDNNWYLGQNEATLTCDARSNPEPTGYNWSTTMGPLPPFAVAQGAQLLIRPVDKPINTTLICNVTNALGARQAELTVQVKEGPPSEHSGISRN

SEQ ID NO: 463 - protein, 323 aa, Artificial Sequence
  CD155 v111 ECD
WPPPGTGDVVVQAPTQVLGFLGDSVTLPCYLQVPNMEVTHVPQLQWARHGESGSMAVFHQGQGPHYEESKRLEFVAARLGAELRNASLRMFGLRVEDEGNYTCTFVTFPQGSRSVNIWLRVLAKPQNTAEVQKVQLTGEPVPMARCVSTGGRPPAQITWHSDLGGMPNTSQVPGFLSGTVTVTSLWILVPSSQVDGKNVTCKVEHESFEKPQLLTVNLTVYYPPEVSISGYDNNWYLGQNEATLTCDARSNPEPTGYNWSTTMGPLPPFAVAQGAQLLIRPVDKPINTTLICNVTNALGARQAELTVQVKEGPPSEHSGISRN

SEQ ID NO: 464 - protein, 323 aa, Artificial Sequence
  CD155 v112 ECD
WPPPGTGDVVVQAPTQVSGFLGDSVTLPCYLQVPNMEVTTMSQLTWVRHGEQGSMAVFHQTLGPTYSESKRLRFVAARLGAELRNASLRMFGLRVEDEGNYTCMFATFPQGSRSVDIWLRVLAKPQNTAEVQKVQLTGEPVPMARCVSTGGRPPAQITWHSDLGGMPNTSQVPGFLSGTVTVTSLWILVPSSQVDGKNVTCKVEHESFEKPQLLTVNLTVYYPPEVSISGYDNNWYLGQNEATLTCDARSNPEPTGYNWSTTMGPLPPFAVAQGAQLLIRPVDKPINTTLICNVTNALGARQAELTVQVKEGPPSEHSGISRN

SEQ ID NO: 465 - protein, 323 aa, Artificial Sequence
  CD155 v113 ECD
WPPPGTGDVVVQAPTQVPGFLGDSVTLPCYLQVPNMEVTTMSQLTWVRHGEQGSMAVFHQTLGPTYSGSKRLRFVAARLGAELRNASLRMFGLRVEGSGNYTCTFVTFPQGSRSVDIWLRVLAKPQNTAEVQKVQLTGEPVPMARCVSTGGRPPAQITWHSDLGGMPNTSQVPGFLSGTVTVTSLWILVPSSQVDGKNVTCKVEHESFEKPQLLTVNLTVYYPPEVSISGYDNNWYLGQNEATLTCDARSNPEPTGYNWSTTMGPLPPFAVAQGAQLLIRPVDKPINTTLICNVTNALGARQAELTVQVKEGPPSEHSGISRN

SEQ ID NO: 466 - protein, 323 aa, Artificial Sequence
  CD155 v114 ECD
WPPPGTGDVVVQAPTQVPGFLGDSVTLPCYLQVPNMEVTHVSQLQWARHGEEGSMAVFHQTQGPSYSESKRLEFVAARLGAELRNASLRMFGLRVEDEGNYTCEFVTFPQGSRSVDIWLRVLAKPQNTAEVQKVQLTGEPVPMARCVSTGGRPPAQITWHSDLGGMPNTSQVPGFLSGTVTVTSLWILVPSSQVDGKNVTCKVEHESFEKPQLLTVNLTVYYPPEVSISGYDNNWYLGQNEATLTCDARSNPEPTGYNWSTTMGPLPPFAVAQGAQLLIRPVDKPINTTLICNVTNALGARQAELTVQVKEGPPSEHSGISRN

SEQ ID NO: 467 - protein, 323 aa, Artificial Sequence
  CD155 v115 ECD
WPPPGTGDVVVQAPTQVPGFLGDSVTLPCYLQVPNMEVTHVSQLQWARHGEEGSMAVFHQTFGPSYSESKRLEFVAARLGAELRNASLRMFGLRVEDEGNYTCEFVTFPQGSRSVDIWLRVLAKPQNTAEVQKVQLTGEPVPMARCVSTGGRPPAQITWHSDLGGMPNTSQVPGFLSGTVTVTSLWILVPSSQVDGKNVTCKVEHESFEKPQLLTVNLTVYYPPEVSISGYDNNWYLGQNEATLTCDARSNPEPTGYNWSTTMGPLPPFAVAQGAQLLIRPVDKPINTTLICNVTNALGARQAELTVQVKEGPPSEHSGISRN

SEQ ID NO: 468 - protein, 323 aa, Artificial Sequence
  CD155 v116 ECD
WPPPGTGDVVVQAPTQVFGFLGDSVMLPCYLQVPNMEVTHVSQVTWARHGESGSMAVFHQTKGPSYSESKRLEFVAARPGAELRNASLRMSGLRVEDEGNYTCMFVTFPQDSRSVDIWLRVLAKPQNTAEVQKVQLTGEPVPMARCVSTGGRPPAQITWHSDLGGMPNTSQVPGFLSGTVTVTSLWILVPSSQVDGKNVTCKVEHESFEKPQLLTVNLTVYYPPEVSISGYDNNWYLGQNEATLTCDARSNPEPTGYNWSTTMGPLPPFAVAQGAQLLIRPVDKPINTTLICNVTNALGARQAELTVQVKEGPPSEHSGISRN

SEQ ID NO: 469 - protein, 323 aa, Artificial Sequence
  CD155 v117 ECD
WPPPGTGDVVVQAPTQVSGFLGDSVTLPCYLQVPNMEVTHVSQLSWARHGESGSMAVFHQKQGPWYAESKRLEFVAARLGAELRNASLRMSGLRVEDEGNYTCLFVTFPQRSRSVDIWLRVLAKPQNTAEVQKVQLTGEPVPMARCVSTGGRPPAQITWHSDLGGMPNTSQVPGFLSGTVTVTSLWILVPSSQVDGKNVTCKVEHESFEKPQLLTVNLTVYYPPEVSISGYDNNWYLGQNEATLTCDARSNPEPTGYNWSTTMGPLPPFAVAQGAQLLIRPVDKPINTTLICNVTNALGARQAELTVQVKEGPPSEHSGISRN

SEQ ID NO: 470 - protein, 323 aa, Artificial Sequence
  CD155 v118 ECD
WPPPGTGDVVVQAPTQVSGFLGDSVTLPCYLQVPNMEVTHVSQLTWARHGESGSMAVFHQTQGPSYSESKRLEFVAARPGAELRNASLRMFGLRVEDEGNYTCMFVMFPQGSRSVDIWLRVLAKPQNTAEVQKVQLTGEPVPMARCVSTGGRPPAQITWHSDLGGMPNTSQVPGFLSGTVTVTSLWILVPSSQVDGKNVTCKVEHESFEKPQLLTVNLTVYYPPEVSISGYDNNWYLGQNEATLTCDARSNPEPTGYNWSTTMGPLPPFAVAQGAQLLIRPVDKPINTTLICNVTNALGARQAELTVQVKEGPPSEHSGISRN

SEQ ID NO: 471 - protein, 323 aa, Artificial Sequence
  CD155 v119 ECD
WPPPGTGDVVVQAPTQVSGFLGDSVTLPCYLQVPNMEVTHVSQLTWARHGESGSMAVFHQTQGPWYAESKRLEFVAARLGAELRNASLRVFGLRAEDEGNYTCQFVTFPQRSRSVDIWLRVLAKPQNTAEVQKVQLTGEPVPMARCVSTGGRPPAQITWHSDLGGMPNTSQVPGFLSGTVTVTSLWILVPSSQVDGKNVTCKVEHESFEKPQLLTVNLTVYYPPEVSISGYDNNWYLGQNEATLTCDARSNPEPTGYNWSTTMGPLPPFAVAQGAQLLIRPVDKPINTTLICNVTNALGARQAELTVQVKEGPPSEHSGISRN

SEQ ID NO: 472 - protein, 116 aa, Artificial Sequence
  CD155 v23 IgV
PGTGDVVVQAPTQVPGFLGDSVTLPCYLQVPNMEVTHVSQLTWARHGEMGSMAVFHQTQGPSYSESKRLEFVAARLGAELRNASLRMFGLRVEDEGNYTCLFVTFPQGSRSVDIWL

SEQ ID NO: 473 - protein, 116 aa, Artificial Sequence
  CD155 v24 IgV
PGTGDVVVQAPTQVPGFLGDSVTLPCYLQVPNMEVTHVSQLQWARHGELGSMAVFHQTQGPSYSESKRLEFVAARLGAELRNASLRMFGLRVEDEGNYTCEFVTFPQRSRSVDIWL

SEQ ID NO: 474 - protein, 116 aa, Artificial Sequence
  CD155 v25 IgV
PGTGDVVVQAPTQVPGFLGDSVTLPCYLQVPNMEVTHVGQLTWARHGESGSMAVFHQTQGPSYSESKRLEFVAARLGAELRNASLRMFGLRVEDEGNYTCLFVTFPQGSRSVDIWL

SEQ ID NO: 475 - protein, 116 aa, Artificial Sequence
  CD155 v26 IgV
PGTGDVVVQAPTQVPGFLGDSVTLPCYLQVPNMEVTHVSQLTWARHGESGSMAVFHQTFGPSYSESKRLEFVAARLGAELRNASLRMFGLRVEDEGNYTCLFVTFPQGSRSVDIWL

SEQ ID NO: 476 - protein, 119 aa, Artificial Sequence
  CD155 v27 IgV
PGTGDVVVQAPTQVPGFLGDSVTLPCYLQVPNMEVTHVSQLTWARHGEQGSMAVFHQTQGPSYSESKRLEFVAARLGAELRNASLRMFGLRVEDEGNYTCLFVTFPQGSRSVDIWLRVL

SEQ ID NO: 477 - protein, 116 aa, Artificial Sequence
  CD155 v28 IgV
PGTGDVVVQAPTQVPGFLGDSVTLPCYLQVPNMEVTHVAQLTWARHGESGSMAVFHQTQGPSYSESKRLEFVAARLGAELRNASLRMFGLRVEDEGNYTCQFVTFPQRSRSVDIWL

SEQ ID NO: 478 - protein, 116 aa, Artificial Sequence
  CD155 v29 IgV
PGTGDVVVQAPTQVPGFLGDSVTLPCYLQVPNMEVTHVAQLTWARHGEQGSMAVFHQTQGPSYSESKRLEFVAARLGAELRNASLRMFGLRVEDEGNYTCQFVTFPQRSRSVDIWL

SEQ ID NO: 479 - protein, 116 aa, Artificial Sequence
  CD155 v30 IgV
PGTGDVVVQAPTQVPGFLGDSVTLPCYLQVPNMEVTHVSQLTWARHGEWGSMAVFHQTQGPSYSESKRLEFVAARLGAELRNASLRMFGLRVEDEGNYTCEFVTFPQGSRSVDIWL

SEQ ID NO: 480 - protein, 116 aa, Artificial Sequence
  CD155 v31 IgV
PGTGDVVVQAPTQVPGFLGDSVTLPCYLQVPNMEVTHVCQLTWARHGESGSMAVFHQTQGPSYSESKRLEFVAARLGAELRNASLRMFGLRVEDEGNYTCLFVTFPQGSRSVDIWL

SEQ ID NO: 481 - protein, 116 aa, Artificial Sequence
  CD155 v32 IgV
PGTGDVVVQAPTQVPGFLGDSVTLPCYLQVPNMEVTHVSQLTWARHGEWGSMAVFHQTQGPSYSESKRLEFVAARLGAELRNASLRMFGLRVEDEGNYTCLFVTFPQGSRSVDIWL

SEQ ID NO: 482 - protein, 116 aa, Artificial Sequence
  CD155 v33 IgV
PGTGDVVVQAPTQVPGFLGDSVTLPCYLQVPNMEVTHVSQLTWARHGEMGSMAVFHQTQGPSYSESKRLEFVAARLGAELRNASLRMFGLRVEDEGNYTCQFVTFPQGSRSVDIWL

SEQ ID NO: 483 - protein, 116 aa, Artificial Sequence
  CD155 v34 IgV
PGTGDVVVQAPTQVPGFLGDSVTLPCYLQVPNMEVTHVLQLTWARHGELGSMAVFHQTFGPSYSESKRLEFVAARLGAELRNASLRMFGLRVEDEGNYTCQFVTFPQGSRSVDIWL

SEQ ID NO: 484 - protein, 116 aa, Artificial Sequence
  CD155 v35 IgV
PGTGDVVVQAPTQVPGFLGDSVTLPCYLQVPNMEVTHVWQLTWARHGESGSMAVFHQTQGPSYSESKRLEFVAARLGAELRNASLRMFGLRVEDEGNYTCLFVTFPQGSRSVDIWL

SEQ ID NO: 485 - protein, 116 aa, Artificial Sequence
  CD155 v36 IgV
PGTGDVVVQAPTQVPGFLGDSVTLPCYLQVPNMEVTHVQQLTWARHGESGSMAVFHQTQGPSYSESKRLEFVAARLGAELRNASLRMFGLRVEDEGNYTCLFVTFPQGSRSVDIWL

SEQ ID NO: 486 - protein, 116 aa, Artificial Sequence
  CD155 v37 IgV
PGTGDVVVQAPTQVPGFLGDSVTLPCYLQVPNMEVTHVSQLTWARHGELGSMAVFHQTQGPSYSESKRLEFVAARLGAELRNASLRMFGLRVEDEGNYTCLFVTFPQGSRSVDIWL

SEQ ID NO: 487 - protein, 116 aa, Artificial Sequence
  CD155 v38 IgV
PGTGDVVVQAPTQVPGFLGDSVTLPCYLQVPNMEVTHVSQLTWARHGERGSMAVFHQTQGPSYSESKRLEFVAARLGAELRNASLRMFGLRVEDEGNYTCLFVTFPQGSRSVDIWL

SEQ ID NO: 488 - protein, 116 aa, Artificial Sequence
  CD155 v39 IgV
PGTGDVVVQAPTQVPGFLGDSVTLPCYLQVPNMEVTHVSQLTWARHGESGSMAVFHQTQGPSYSESKRLEFVAARLGAELRNASLRMFGLRVEDEGNYTCEFVTFPQGSRSVDIWL

SEQ ID NO: 489 - protein, 116 aa, Artificial Sequence
  CD155 v40 IgV
PGTGDVVVQAPTQVPGFLGDSVTLPCYLQVPNMEVTHVSQLTWARHGESGSMAVFHQTQGPSYSESKRLEFVAARLGAELRNASLRMFGLRVEDEGNYTCLFVTFPQRSRSVDIWL

SEQ ID NO: 490 - protein, 116 aa, Artificial Sequence
  CD155 v41 IgV
PGTGDVVVQAPTQVPGFLGDSVTLPCYLQVPNMEVTHVSQLTWARHGEEGSMAVFHQTQGPSYSESKRLEFVAARLGAELRNASLRMFGLRVEDEGNYTCLFVTFPQGSRSVDIWL

SEQ ID NO: 491 - protein, 116 aa, Artificial Sequence
  CD155 v42 IgV
PGTGDVVVQAPTQVPGFLGDSVTLPCYLQVPNMEVTHVSQLTWARHGESGSMAVFHQTYGPSYSESKRLEFVAARLGAELRNASLRMFGLRVEDEGNYTCLFVTFPQGSRSVDIWL

SEQ ID NO: 492 - protein, 116 aa, Artificial Sequence
  CD155 v43 IgV
PGTGDVVVQAPTQVPGFLGDSVTLPCYLQVPNMEVTHVSQLQWARHGEMGSMAVFHQTQGPSYSESKRLEFVAARLGAELRNASLRMFGLRVEDEGNYTCEFVTFPQGSRSVDIWL

SEQ ID NO: 493 - protein, 116 aa, Artificial Sequence
  CD155 v44 IgV
PGTGDVVVQAPTQVPGFLGDSVTLPCYLQVPNMEVTHVNQLTWARHGESGSMAVFHQTQGPSYSESKRLEFVAARLGAELRNASLRMFGLRVEDEGNYTCQFVTFPQRSRSVDIWL

SEQ ID NO: 494 - protein, 116 aa, Artificial Sequence
  CD155 v45 IgV
PGTGDVVVQAPTQVPGFLGDSVTLPCYLQVPNMEVTHVSQLTWARHGEMGSMALFHQTQGPSYSESKRLEFVAARLGAELRNASLRMFGLRVEDEGNYTCLFVTFPQGSRSVDIWL

SEQ ID NO: 495 - protein, 116 aa, Artificial Sequence
  CD155 v46 IgV
PGTGDVVVQAPTQVPGFLGDSVTLPCYLQVPNMEVTHVNQLTWARHGEQGSMAVFHQTFGPSYSESKRLEFVAARLGAELRNASLRMFGLRVEDEGNYTCLFVTFPQGSRSVDIWL

SEQ ID NO: 496 - protein, 116 aa, Artificial Sequence
  CD155 v47 IgV
PGTGDVVVQAPTQVPGFLGDSVTLPCYLQVPNMEVTHVAQLTWARHGELGSMAVFHQTQGPSYSESKRLEFVAARLGAELRNASLRMFGLRVEDEGNYTCEFVTFPQRSRSVDIWL

SEQ ID NO: 497 - protein, 116 aa, Artificial Sequence
  CD155 v48 IgV
PGTGDVVVQAPTQVPGFLGDSVTLPCYLQVPNMEVTHVWQLTWARHGEQGSMALFHQTYGPSYSESKRLEFVAARLGAELRNASLRMFGLRVEDEGNYTCLFVTFPQGSRSVDIWL

SEQ ID NO: 498 - protein, 116 aa, Artificial Sequence
  CD155 v49 IgV
PGTGDVVVQAPTQVPGFLGDSVTLPCYLQVPNMEVTHVSQLTWARHGESGSMAVFHQTQGPSYSESKRLEFVAARLGAELRNASLRMFGLRVEDEGNYTCQFVTFPQGSRSVDIWL

SEQ ID NO: 499 - protein, 116 aa, Artificial Sequence
  CD155 v50 IgV
PGTGDVVVQAPTQVPGFLGDSVTLPCYLQVPNMEVTHVLQLTWARHGEQGSMAVFHQTQGPSYSESKRLEFVAARLGAELRNASLRMFGLRVEDEGNYTCEFVTFPQGSRSVDIWL

SEQ ID NO: 500 - protein, 116 aa, Artificial Sequence
  CD155 v51 IgV
PGTGDVVVQAPTQVPGFLGDSVTLPCYLQVPNMEVTHVCQLTWARHGELGSMAVFHQTQGPSYSESKRLEFVAARLGAELRNASLRMFGLRVEDEGNYTCLFVTFPQGSRSVDIWL

SEQ ID NO: 501 - protein, 116 aa, Artificial Sequence
  CD155 v52 IgV
PGTGDVVVQAPTQVPGFLGDSVTLPCYLQVPNMEVTHVWQLTWARHGERGSMAVFHQTYGPSYSESKRLEFVAARLGAELRNASLRMFGLRVEDEGNYTCQFVTFPQGSRSVDIWL

SEQ ID NO: 502 - protein, 116 aa, Artificial Sequence
  CD155 v53 IgV
PGTGDVVVQAPTQVPGFLGDSVTLPCYLQVPNMEVTHVSQLQWARHGERGSMAVFHQTQGPSYSESKRLEFVAARLGAELRNASLRMFGLRVEDEGNYTCEFVTFPQGSRSVDIWL

SEQ ID NO: 503 - protein, 116 aa, Artificial Sequence
  CD155 v54 IgV
PGTGDVVVQAPTQVPGFLGDSVTLPCYLQVPNMEVTHVSQLTWARHGERGSMAVFHQTFGPSYSESKRLEFVAARLGAELRNASLRMFGLRVEDEGNYTCQFVTFPQRSRSVDIWL

SEQ ID NO: 504 - protein, 116 aa, Artificial Sequence
  CD155 v55 IgV
PGTGDVVVQAPTQVPGFLGDSVTLPCYLQVPNMEVTHVSQLQWARHGELGSMALFHQTQGPSYSESKRLEFVAARLGAELRNASLRMFGLRVEDEGNYTCEFVTFPQGSRSVDIWL

SEQ ID NO: 505 - protein, 116 aa, Artificial Sequence
  CD155 v56 IgV
PGTGDVVVQAPTQVPGFLGDSVTLPCYLQVPNMEVTHVSQLTWARHGEMGSMAVFHQTYGPSYSESKRLEFVAARLGAELRNASLRMFGLRVEDEGNYTCLFVTFPQGSRSVDIWL

SEQ ID NO: 506 - protein, 116 aa, Artificial Sequence
  CD155 v57 IgV
PGTGDVVVQAPTQVPGFLGDSVTLPCYLQVPNMEVTHVSQLTWARHGESGSMAVFHQTFGPSYSESKRLEFVAARLGAELRNASLRMFGLRVEDEGNYTCEFVTFPQRSRSVDIWL

SEQ ID NO: 507 - protein, 116 aa, Artificial Sequence
  CD155 v58 IgV
PGTGDVVVQAPTQVPGFLGDSVTLPCYLQVPNMEVTHVSQLQWARHGEQGSMAVFHQTQGPSYSESKRLEFVAARLGAELRNASLRMFGLRVEDEGNYTCLFVTFPQGSRSVDIWL

SEQ ID NO: 508 - protein, 116 aa, Artificial Sequence
  CD155 v59 IgV
PGTGDVVVQAPTQVPGFLGDSVTLPCYLQVPNMEVTHVSQLTWARHGELGSMAVFHQTQGPSYSESKRLEFVAARLGAELRNASLRMFGLRVEDEGNYTCEFVTFPQGSRSVDIWL

SEQ ID NO: 509 - protein, 116 aa, Artificial Sequence
  CD155 v60 IgV
PGTGDVVVQAPTQVPGFLGDSVTLPCYLQVPNMEVTHVVQLTWARHGEEGSMAVFHQTQGPSYSESKRLEFVAARLGAELRNASLRMFGLRVEDEGNYTCLFVTFPQGSRSVDIWL

SEQ ID NO: 510 - protein, 116 aa, Artificial Sequence
  CD155 v61 IgV
PGTGDVVVQAPTQVPGFLGDSVTLPCYLQVPNMEVTHVSQLQWARHGERGSMAVFHQTQGPSYSESKRLEFVAARLGAELRNASLRMFGLRVEDEGNYTCLFVTFPQRSRSVDIWL

SEQ ID NO: 511 - protein, 116 aa, Artificial Sequence
  CD155 v62 IgV
PGTGDVVVQAPTQVPGFLGDSVTLPCYLQVPNMEVTHVGQLTWARHGEQGSMAVFHQTQGPSYSESKRLEFVAARLGAELRNASLRMFGLRVEDEGNYTCEFVTFPQRSRSVDIWL

SEQ ID NO: 512 - protein, 116 aa, Artificial Sequence
  CD155 v63 IgV
PGTGDVVVQAPTQVPGFLGDSVTLPCYLQVPNMEVTHVNQLTWARHGEEGSMALFHQTQGPSYSESKRLEFVAARLGAELRNASLRMFGLRVEDEGNYTCEFVTFPQGSRSVDIWL

SEQ ID NO: 513 - protein, 116 aa, Artificial Sequence
  CD155 v64 IgV
PGTGDVVVQAPTQVPGFLGDSVTLPCYLQVPNMEVTHVCQLTWARHGEMGSMAVFHQTFGPSYSESKRLEFVAARLGAELRNASLRMFGLRVEDEGNYTCLFVTFPQGSRSVDIWL

SEQ ID NO: 514 - protein, 116 aa, Artificial Sequence
  CD155 v65 IgV
PGTGDVVVQAPTQVPGFLGDSVTLPCYLQVPNMEVTHVLQLTWARHGESGSMAVFHQTQGPSYSESKRLEFVAARLGAELRNASLRMFGLRVEDEGNYTCLFVTFPQGSRSVDIWL

SEQ ID NO: 515 - protein, 116 aa, Artificial Sequence
  CD155 v66 IgV
PGTGDVVVQAPTQVPGFLGDSVTLPCYLQVPNMEVTHVAQLTWARHGESGSMAVFHQTQGPSYSESKRLEFVAARLGAELRNASLRMFGLRVEDEGNYTCLFVTFPQGSRSVDIWL

SEQ ID NO: 516 - protein, 116 aa, Artificial Sequence
  CD155 v67 IgV
PGTGDVVVQAPTQVPGFLGDSVTLPCYLQVPNMEVTHVGQLTWARHGELGSMAVFHQTFGPSYSESKRLEFVAARLGAELRNASLRMFGLRVEDEGNYTCQFVTFPQGSRSVDIWL

SEQ ID NO: 517 - protein, 116 aa, Artificial Sequence
  CD155 v68 IgV
PGTGDVVVQAPTQVPGFLGDSVTLPCYLQVPNMEVTHVNQLTWARHGESGSMAVFHQTQGPSYSESKRLEFVAARLGAELRNASLRMFGLRVEDEGNYTCLFVTFPQGSRSVDIWL

SEQ ID NO: 518 - protein, 116 aa, Artificial Sequence
  CD155 v69 IgV
PGTGDVVVQAPTQVTGFLGDSVTLPCYLQVPNMEVTHVSQLTWARHGESGSMAVFHQTQGPAYVESKRLEFVAARLGAELRNASLRMSGLRVEDEGNYTCLFVTFPQGSRSVDIWL

SEQ ID NO: 519 - protein, 116 aa, Artificial Sequence
  CD155 v70 IgV
PGTGDVVVQAPTQVFGFLGDSVTLPCYLQVPNMEVAHVSQLQWARHGESGSMAVFHQRQGPNYLESKRLGFVAAGLGAELRNASLRMFGLRVEDEGNYTCLFVTFPQGSRSVDIWL

SEQ ID NO: 520 - protein, 116 aa, Artificial Sequence
  CD155 v71 IgV
PGTGDVVVQAPTQVTGFLGDSVTLPCYLQVPNMEVTHVSQLQWARHGESGSMAVFHQRQGPNYLESKRLEFVAARLGAELRNASLRMFGLRVEDEGNYTCLFVTFPQGSRSVDIWL

SEQ ID NO: 521 - protein, 116 aa, Artificial Sequence
  CD155 v72 IgV
PGTGDVVVQAPTQVFGFLGDSVTLPCYLQVPNMEVTHVSQLTWARHGESGSMAVFHQTQGPAYVESKRLEFVAARLGAELRNASLRMSGLRVEDEGNYTCLFVTFPQGSRSVDIWL

SEQ ID NO: 522 - protein, 116 aa, Artificial Sequence
  CD155 v73 IgV
PGTGDVVVQAPTQVFGFLGDSVTLPCYLQVPNMEVTHVSQLQWARHGESGSMAVFHQRQGPNYLESKRLEFVAARLGAELRNASLRMSGLRVEDEGNYTCPFVTFPQGSRSVDIWL

SEQ ID NO: 523 - protein, 116 aa, Artificial Sequence
  CD155 v74 IgV
PGTGDVVVQAPTQVSGFLGDSVTLPCYLQVPNMEVTHVSQLTWARHGESGSMAVFHQTQGPSYSESKRLEFVAARPGAELRNASLRMFGLRVEDEGNYTCMFVTFPQGSRSVDIWL

SEQ ID NO: 524 - protein, 116 aa, Artificial Sequence
  CD155 v75 IgV
PGTGDVVVQAPTQVSGFLGDSVTLPCYLQVPNMEVTHVSQLTWARHGESGSMAVFHQTQGPSYSESKRLEFVAARLGAELRNASLRMFGLRVEDEGNYTCMFVTFPQGSRSVDIWL

SEQ ID NO: 525 - protein, 116 aa, Artificial Sequence
  CD155 v76 IgV
PGTGDVVVQAPTQVPGFLGDSVTLPCYLQVPNMEVTHVSQLTWARHGESGSMAVFHQTQGPSYSESKRLEFVAARPGAELRNASLRMFGLRVEDEGNYTCMFVTFPQGSRSVDIWL

SEQ ID NO: 526 - protein, 116 aa, Artificial Sequence
  CD155 v77 IgV
PGTGDVVVQAPTQVTGFLGDSVTLPCYLQVPNMEVTHVSQLQWARHGESGSMAVFHQTQGPSYSESKRLEFVAARPGAELRNASLRMFGLRVEDEGNYTCLFVTFPQGSRSVDIWL

SEQ ID NO: 527 - protein, 116 aa, Artificial Sequence
  CD155 v78 IgV
PGTGDVVVQAPTQVTGFLGDSVTLPCYLQVPNMEVTHVSQLQWARHGESGSMAVFHQRQGPHYHESKRLEFVAARLGAELRNASLRMFGLRVEDEGNYTCLFVTFPQGSRSVDIWL

SEQ ID NO: 528 - protein, 116 aa, Artificial Sequence
  CD155 v79 IgV
PGTGDVVVQAPTQVTGFLGDSVTLPCYLQVPNMEVTHVSQLTWARHGESGSMAVFHQTQGPSYSESKRLEFVAARLGEELRNASLRMFGLRVEDEGNYTCLFVTFPQGSRSVDIWL

SEQ ID NO: 529 - protein, 116 aa, Artificial Sequence
  CD155 v80 IgV
PGTGDVVVQAPTQVSGFLGYSVTLPCYLQVPNMPVTHVSQLTWARHGEGGSMAVFHQTMGPSYSESKRLEFVAARLSPELRNASLRMFGLRVEDEYNYTCLFVTFPQGNRSVDIWL

SEQ ID NO: 530 - protein, 116 aa, Artificial Sequence
  CD155 v81 IgV
PGTGDVVVQRPTQVPGFLGYSVTLPCYLQVPNMPVTHVPQLTWARHGESGSMAVFHQTYGPSYSESKRLEFVAARLGEELRNASLRMFGLRVEDEGNYTCLFVTFPQGSRSVDIWL

SEQ ID NO: 531 - protein, 116 aa, Artificial Sequence
  CD155 v82 IgV
PGTGDVVVQRPTQVPGFLGYSVTLPCYLQVPNMPVTHVSQLTWARHGESGSMAVFHQTQGPSYSESKRLEFVAARLGAELRNASLRMFGLRVEDEYNYTCLFVTFPQGNRSVDIWL

SEQ ID NO: 532 - protein, 116 aa, Artificial Sequence
  CD155 v83 IgV
PGTGDVVVQRPTQVPGFLGYSVTLPCYLQVPNMPVTHVSQLTWARHGESGSMAVFHQTMGPSYSESKRLEFVAVRLSPELRNASLRMFGLRVEDEYNYTCLFVTFPQGSRSVDIWL

SEQ ID NO: 533 - protein, 116 aa, Artificial Sequence
  CD155 v84 IgV
PGTGDVVVQAPTQVLGFLGDSVTLPCYLQVPNMSVTHVSQLTWARHGESGSMAVFHQTMGPSYSESKRLEFVAARLSPELRNASLRMFGLRVEDEYNYTCLFVTFPQGNRSVDIWL

SEQ ID NO: 534 - protein, 116 aa, Artificial Sequence
  CD155 v85 IgV
PGTGDVVVQAPTQVSGFLGDSVTLPCYLQVPNMEVTHVSQLTWARHGESGSMAVFHQTQGPSYSESKRLEFVAARLGAELRNASLRMFGLRVEDEGNYTCTFVTFPQGSRSVDIWL

SEQ ID NO: 535 - protein, 116 aa, Artificial Sequence
  CD155 v86 IgV
PGTGDVVVQAPTQVSGFLGDSVTLPCYLQVPNMEVTHVSQLTWARHGESGSMAVFHQTHGPSYSESKRLEFVAARQGAELRNASLRMSGLRVEDEGNYTCLFVTFPQGSRSVDIWL

SEQ ID NO: 536 - protein, 116 aa, Artificial Sequence
  CD155 v87 IgV
PGTGDVVVQAPTQVPGFLGDSVTLPCYLQVPNMEVTHVSQLQWARHGEKGSMAVFHQTFGPSYSESKRLEFVAARLGAELRNASLRMFGLRVEDEGNYTCQFVTFPQRSRSVDIWL

SEQ ID NO: 537 - protein, 116 aa, Artificial Sequence
  CD155 v88 IgV
PGTGDVVVQAPTQVPGFLGDSVTLPCYLQVPNMEVTHVSQLQWARHGEQGSMAVFHQTYGPSYSESKRLEFVAARLGAELRNASLRMFGLRVEDEGNYTCQFVTFPQRSRSVDIWL

SEQ ID NO: 538 - protein, 116 aa, Artificial Sequence
  CD155 v89 IgV
PGTGDVVVQAPTQVPGFLGDSVTLPCYLQVPNMEVTHVSQLQWARHGEQGSMAVFHQTYGPSYSESKRLEFVAARLGAELRNASLRMFGLRVEDEGNYTCEFVTFPQRSRSVDIWL

SEQ ID NO: 539 - protein, 116 aa, Artificial Sequence
  CD155 v90 IgV
PGTGDVVVQAPTQVPGFLGDSVTLPCYLQVPNMEVTHVSQLTWARHGESGSMAAFHQMQGPWYAESKRLEFVAARLGAELRNASLRMFGLRVDDEGNYTCTFVTFPQGSRSVDIWL

SEQ ID NO: 540 - protein, 116 aa, Artificial Sequence
  CD155 v91 IgV
PGTGDVVVQAPTQVLGFLGDSVTLPCYLQVPNMEVTHVSQLTWARHGESGSMATFHQSQGPYYAESKRLEFVAARLGAELRNASLRMFGLRVEDEGNYTCTFVTFPQGSRSVDIWL

SEQ ID NO: 541 - protein, 116 aa, Artificial Sequence
  CD155 v92 IgV
PGTGDVVVQAPTQVTGFLGDSVTLPCYLQVPNMEVTHVSQLQWARHGESGSMAVFHQTQGPSYSESKRLEFVAARLGAELRNASLRMFGLRVEDEGNYTCLFVTFPQGSRSVDIWL

SEQ ID NO: 542 - protein, 116 aa, Artificial Sequence
  CD155 v93 IgV
PGTGDVVVQAPTQVLGFLGDSVTLPCYLQVPNMEVTHVSQLTWARHGESGSMAAFHQMQGPWYAESKRLEFVAARLGAELRNASLRMFGLRVEDEGNYTCTFVTFPQGSRSVDIWL

SEQ ID NO: 543 - protein, 116 aa, Artificial Sequence
  CD155 v94 IgV
PGTGDVVVQAPTQVPGFLGDSVTLPCYLQVPNMEVTHVSQLTWARHGESGSMAVFHQMQGPWYAESKRLEFVAARLGAELRNASLRMFGLRVEDEGNYTCTFVTFPQGSRSVDIWL

SEQ ID NO: 544 - protein, 116 aa, Artificial Sequence
  CD155 v95 IgV
PGTGDVVVQAPTQVSGFLGDSVTLPCYLQVPNMEVTHAGQLGWARHGESGSMAVFHQTQGPSYSESKRLEFVAARLGAELRNASLRMFGLRVEDEGNYTCNFVTFPQGSRSVDIWL

SEQ ID NO: 545 - protein, 116 aa, Artificial Sequence
  CD155 v96 IgV
PGTGDVVVQAPTQVHGFLGDSVTLPCYLQVPNMEVTHVGQLIWARHGETRHMALFEQSQGPDYSGSKRLEFVAARLGAELRNASLRMFGLRVEDEGNYTCNFVTFPQGSRSVDIWL

SEQ ID NO: 546 - protein, 116 aa, Artificial Sequence
  CD155 v97 IgV
PGTGDVVVQAPTQVSGFLGDSVTLPCYLQVPNMEVTHVGQLVWARHGESGSMAVLHQTQGPSYWESKRLEFVAARLGAELRNASLRMFGLRVEDEGNYTCNFVTFPQGSRSVDIWL

SEQ ID NO: 547 - protein, 116 aa, Artificial Sequence
  CD155 v98 IgV
PGTGDVVVQAPTQVSGFLGDSVTLPCYLQVPNMEVTHVSQLIWARHGESGSMAVFHQTQGPSYSESKRLEFVAARLGAELRNASLRMFGLRVEDEGNYTCNFVTFPQGSRSVDIWL

SEQ ID NO: 548 - protein, 116 aa, Artificial Sequence
  CD155 v99 IgV
PGTGDVVVQAPTQVSGFLGDSVTLPCYLQVPNMEVTHVGQLGWARHGESGSMAVFHQTQGPSYSESKRLEFVAARLGAELRNASLRMFGLRVEDEGNYTCNFATFPQGSRSVDIWL

SEQ ID NO: 549 - protein, 116 aa, Artificial Sequence
  CD155 v100 IgV
PGTGDVVVQAPTQVHGFLGDSVTLPCYLQVPNMEVTRVGQLIWARHGETRHMALFEQSQGPDYSGSKRLEFVAARLGAELRNASLRMFGLRVEDEGNYTCYFLTHPQGSRSVDIWL

SEQ ID NO: 550 - protein, 116 aa, Artificial Sequence
  CD155 v101 IgV
PGTGDVVVQAPTQVPGFLGDSVTLPCYLQVPNMVVTHVGQLGWARHGESGSMAVFHQTQGPSYSESKRLEFVAARLGAELRNASLRMFGLRVEDEGNYTCNFVTFPQGSRSVDIWL

SEQ ID NO: 551 - protein, 116 aa, Artificial Sequence
  CD155 v102 IgV
PGTGDVVVQAPTQVSGFLGDSVTLPCYLQVPNMEVTHVSQLQWARHGESGSMAVFHQTQGPSYSESKRLEFVAARPGAELRNASLRMFGLRVEDEGNYTCTFVTFPQGSRSVDIWL

SEQ ID NO: 552 - protein, 116 aa, Artificial Sequence
  CD155 v103 IgV
PGTGDVVVQAPTQVLGFLGDSVTLPCYLQVPNMEVTHVSQLTWARHGESGSMAVFHQTRGPSYSESKRLEFVAARLGAELRNASLRMFGLRVEDEGNYTCLFVTFPQGSRSVDIWL

SEQ ID NO: 553 - protein, 116 aa, Artificial Sequence
  CD155 v104 IgV
PGTGDVVVQRPTQVPGFLGYSVTLPCYLQVPNMPVTHVLQLTWARHGEGGSMAVFHQTYGPSYSESKRLEFVAARLGEELRNASLRMFGLRVEDEGNYTCLFVTFPQGSRSVDIWL

SEQ ID NO: 554 - protein, 116 aa, Artificial Sequence
  CD155 v105 IgV
PGTGDVVVQAPTQVLGFLGDSVTLPCYLQVPNMEVTHVSQLTWARRGESGSMAVFHQTQGPSYSESKRLEFVAARLGAELRNASLRMFGLRVEDEGNYTCTFVTFPQGSRSVNIWL

SEQ ID NO: 555 - protein, 116 aa, Artificial Sequence
  CD155 v106 IgV
PGTGDVVVQRPTQVPGFLGYSVTLPCYLQVPNMPVTHVSQLTWARHGESGSMAVFHQTMGPSYSESKRLEFVAARLSPELRNASLRMFGLRVEDEGNYTCTFVTFPQGSRSVDIWL

SEQ ID NO: 556 - protein, 116 aa, Artificial Sequence
  CD155 v107 IgV
PGTGDVVVQAPTQVPGFLGDSVTLPCYLQVPNMEVTHVSQLTWARHGESGSMAVFHQTQGPTYSESKRLEFVAARLGAELRNASLRMFGLRVEDEGNYTCTFVTFPQGSRSVDIWL

SEQ ID NO: 557 - protein, 116 aa, Artificial Sequence
  CD155 v108 IgV
PGTGDVVVQRPTQVPGFLGYSVTLPCYLQVPNMPVTHVSQLTWARHGEGGSMAAFHQTMGPSYSESERLEFVAARLGAELRNASLRMFGLRVEDEGNYTCTFVTFPQGSRSVDIWL

SEQ ID NO: 558 - protein, 116 aa, Artificial Sequence
  CD155 v109 IgV
PGTGDVVVQAPTQVLGFLGDSVTLPCYLQVPNMEVTHVSQLTWVRHGESGSMAVFHQTYGPSYSESKRLDFVAARLGAELRNASLRMFGLRVEDEGNYTCTFVTFPQGSRSVDIWL

SEQ ID NO: 559 - protein, 116 aa, Artificial Sequence
  CD155 v110 IgV
PGTGDVVVQAPTQVPGFLGDSVTLPCYLQVPNMEVTTMSQLTWVRHGEQGSMAVFHQTLGPTYSESKRLRFVAARLGAELRNASLRMFGLRVEGSGNYTCTFVTFPQGSRSVNIWL

SEQ ID NO: 560 - protein, 116 aa, Artificial Sequence
  CD155 v111 IgV
PGTGDVVVQAPTQVLGFLGDSVTLPCYLQVPNMEVTHVPQLQWARHGESGSMAVFHQGQGPHYEESKRLEFVAARLGAELRNASLRMFGLRVEDEGNYTCTFVTFPQGSRSVNIWL

SEQ ID NO: 561 - protein, 116 aa, Artificial Sequence
  CD155 v112 IgV
PGTGDVVVQAPTQVSGFLGDSVTLPCYLQVPNMEVTTMSQLTWVRHGEQGSMAVFHQTLGPTYSESKRLRFVAARLGAELRNASLRMFGLRVEDEGNYTCMFATFPQGSRSVDIWL

SEQ ID NO: 562 - protein, 116 aa, Artificial Sequence
  CD155 v113 IgV
PGTGDVVVQAPTQVPGFLGDSVTLPCYLQVPNMEVTTMSQLTWVRHGEQGSMAVFHQTLGPTYSGSKRLRFVAARLGAELRNASLRMFGLRVEGSGNYTCTFVTFPQGSRSVDIWL

SEQ ID NO: 563 - protein, 116 aa, Artificial Sequence
  CD155 v114 IgV
PGTGDVVVQAPTQVPGFLGDSVTLPCYLQVPNMEVTHVSQLQWARHGEEGSMAVFHQTQGPSYSESKRLEFVAARLGAELRNASLRMFGLRVEDEGNYTCEFVTFPQGSRSVDIWL

SEQ ID NO: 564 - protein, 116 aa, Artificial Sequence
  CD155 v115 IgV
PGTGDVVVQAPTQVPGFLGDSVTLPCYLQVPNMEVTHVSQLQWARHGEEGSMAVFHQTFGPSYSESKRLEFVAARLGAELRNASLRMFGLRVEDEGNYTCEFVTFPQGSRSVDIWL

SEQ ID NO: 565 - protein, 116 aa, Artificial Sequence
  CD155 v116 IgV
PGTGDVVVQAPTQVFGFLGDSVMLPCYLQVPNMEVTHVSQVTWARHGESGSMAVFHQTKGPSYSESKRLEFVAARPGAELRNASLRMSGLRVEDEGNYTCMFVTFPQDSRSVDIWL

SEQ ID NO: 566 - protein, 116 aa, Artificial Sequence
  CD155 v117 IgV
PGTGDVVVQAPTQVSGFLGDSVTLPCYLQVPNMEVTHVSQLSWARHGESGSMAVFHQKQGPWYAESKRLEFVAARLGAELRNASLRMSGLRVEDEGNYTCLFVTFPQRSRSVDIWL

SEQ ID NO: 567 - protein, 116 aa, Artificial Sequence
  CD155 v118 IgV
PGTGDVVVQAPTQVSGFLGDSVTLPCYLQVPNMEVTHVSQLTWARHGESGSMAVFHQTQGPSYSESKRLEFVAARPGAELRNASLRMFGLRVEDEGNYTCMFVMFPQGSRSVDIWL

SEQ ID NO: 568 - protein, 116 aa, Artificial Sequence
  CD155 v119 IgV
PGTGDVVVQAPTQVSGFLGDSVTLPCYLQVPNMEVTHVSQLTWARHGESGSMAVFHQTQGPWYAESKRLEFVAARLGAELRNASLRVFGLRAEDEGNYTCQFVTFPQRSRSVDIWL

SEQ ID NO: 569 - protein, 122 aa, Artificial Sequence
  CD155 v23 IgV
WPPPGTGDVVVQAPTQVPGFLGDSVTLPCYLQVPNMEVTHVSQLTWARHGEMGSMAVFHQTQGPSYSESKRLEFVAARLGAELRNASLRMFGLRVEDEGNYTCLFVTFPQGSRSVDIWLRVL

SEQ ID NO: 570 - protein, 122 aa, Artificial Sequence
  CD155 v24 IgV
WPPPGTGDVVVQAPTQVPGFLGDSVTLPCYLQVPNMEVTHVSQLQWARHGELGSMAVFHQTQGPSYSESKRLEFVAARLGAELRNASLRMFGLRVEDEGNYTCEFVTFPQRSRSVDIWLRVL

SEQ ID NO: 571 - protein, 122 aa, Artificial Sequence
  CD155 v25 IgV
WPPPGTGDVVVQAPTQVPGFLGDSVTLPCYLQVPNMEVTHVGQLTWARHGESGSMAVFHQTQGPSYSESKRLEFVAARLGAELRNASLRMFGLRVEDEGNYTCLFVTFPQGSRSVDIWLRVL

SEQ ID NO: 572 - protein, 122 aa, Artificial Sequence
  CD155 v26 IgV
WPPPGTGDVVVQAPTQVPGFLGDSVTLPCYLQVPNMEVTHVSQLTWARHGESGSMAVFHQTFGPSYSESKRLEFVAARLGAELRNASLRMFGLRVEDEGNYTCLFVTFPQGSRSVDIWLRVL

SEQ ID NO: 573 - protein, 122 aa, Artificial Sequence
  CD155 v27 IgV
WPPPGTGDVVVQAPTQVPGFLGDSVTLPCYLQVPNMEVTHVSQLTWARHGEQGSMAVFHQTQGPSYSESKRLEFVAARLGAELRNASLRMFGLRVEDEGNYTCLFVTFPQGSRSVDIWLRVL

SEQ ID NO: 574 - protein, 122 aa, Artificial Sequence
  CD155 v28 IgV
WPPPGTGDVVVQAPTQVPGFLGDSVTLPCYLQVPNMEVTHVAQLTWARHGESGSMAVFHQTQGPSYSESKRLEFVAARLGAELRNASLRMFGLRVEDEGNYTCQFVTFPQRSRSVDIWLRVL

SEQ ID NO: 575 - protein, 122 aa, Artificial Sequence
  CD155 v29 IgV
WPPPGTGDVVVQAPTQVPGFLGDSVTLPCYLQVPNMEVTHVAQLTWARHGEQGSMAVFHQTQGPSYSESKRLEFVAARLGAELRNASLRMFGLRVEDEGNYTCQFVTFPQRSRSVDIWLRVL

SEQ ID NO: 576 - protein, 122 aa, Artificial Sequence
  CD155 v30 IgV
WPPPGTGDVVVQAPTQVPGFLGDSVTLPCYLQVPNMEVTHVSQLTWARHGEWGSMAVFHQTQGPSYSESKRLEFVAARLGAELRNASLRMFGLRVEDEGNYTCEFVTFPQGSRSVDIWLRVL

SEQ ID NO: 577 - protein, 122 aa, Artificial Sequence
  CD155 v31 IgV
WPPPGTGDVVVQAPTQVPGFLGDSVTLPCYLQVPNMEVTHVCQLTWARHGESGSMAVFHQTQGPSYSESKRLEFVAARLGAELRNASLRMFGLRVEDEGNYTCLFVTFPQGSRSVDIWLRVL

SEQ ID NO: 578 - protein, 122 aa, Artificial Sequence
  CD155 v32 IgV
WPPPGTGDVVVQAPTQVPGFLGDSVTLPCYLQVPNMEVTHVSQLTWARHGEWGSMAVFHQTQGPSYSESKRLEFVAARLGAELRNASLRMFGLRVEDEGNYTCLFVTFPQGSRSVDIWLRVL

SEQ ID NO: 579 - protein, 122 aa, Artificial Sequence
  CD155 v33 IgV
WPPPGTGDVVVQAPTQVPGFLGDSVTLPCYLQVPNMEVTHVSQLTWARHGEMGSMAVFHQTQGPSYSESKRLEFVAARLGAELRNASLRMFGLRVEDEGNYTCQFVTFPQGSRSVDIWLRVL

SEQ ID NO: 580 - protein, 122 aa, Artificial Sequence
  CD155 v34 IgV
WPPPGTGDVVVQAPTQVPGFLGDSVTLPCYLQVPNMEVTHVLQLTWARHGELGSMAVFHQTFGPSYSESKRLEFVAARLGAELRNASLRMFGLRVEDEGNYTCQFVTFPQGSRSVDIWLRVL

SEQ ID NO: 581 - protein, 122 aa, Artificial Sequence
  CD155 v35 IgV
WPPPGTGDVVVQAPTQVPGFLGDSVTLPCYLQVPNMEVTHVWQLTWARHGESGSMAVFHQTQGPSYSESKRLEFVAARLGAELRNASLRMFGLRVEDEGNYTCLFVTFPQGSRSVDIWLRVL

SEQ ID NO: 582 - protein, 122 aa, Artificial Sequence
  CD155 v36 IgV
WPPPGTGDVVVQAPTQVPGFLGDSVTLPCYLQVPNMEVTHVQQLTWARHGESGSMAVFHQTQGPSYSESKRLEFVAARLGAELRNASLRMFGLRVEDEGNYTCLFVTFPQGSRSVDIWLRVL

SEQ ID NO: 583 - protein, 122 aa, Artificial Sequence
  CD155 v37 IgV
WPPPGTGDVVVQAPTQVPGFLGDSVTLPCYLQVPNMEVTHVSQLTWARHGELGSMAVFHQTQGPSYSESKRLEFVAARLGAELRNASLRMFGLRVEDEGNYTCLFVTFPQGSRSVDIWLRVL

SEQ ID NO: 584 - protein, 122 aa, Artificial Sequence
  CD155 v38 IgV
WPPPGTGDVVVQAPTQVPGFLGDSVTLPCYLQVPNMEVTHVSQLTWARHGERGSMAVFHQTQGPSYSESKRLEFVAARLGAELRNASLRMFGLRVEDEGNYTCLFVTFPQGSRSVDIWLRVL

SEQ ID NO: 585 - protein, 122 aa, Artificial Sequence
  CD155 v39 IgV
WPPPGTGDVVVQAPTQVPGFLGDSVTLPCYLQVPNMEVTHVSQLTWARHGESGSMAVFHQTQGPSYSESKRLEFVAARLGAELRNASLRMFGLRVEDEGNYTCEFVTFPQGSRSVDIWLRVL

SEQ ID NO: 586 - protein, 122 aa, Artificial Sequence
  CD155 v40 IgV
WPPPGTGDVVVQAPTQVPGFLGDSVTLPCYLQVPNMEVTHVSQLTWARHGESGSMAVFHQTQGPSYSESKRLEFVAARLGAELRNASLRMFGLRVEDEGNYTCLFVTFPQRSRSVDIWLRVL

SEQ ID NO: 587 - protein, 122 aa, Artificial Sequence
  CD155 v41 IgV
WPPPGTGDVVVQAPTQVPGFLGDSVTLPCYLQVPNMEVTHVSQLTWARHGEEGSMAVFHQTQGPSYSESKRLEFVAARLGAELRNASLRMFGLRVEDEGNYTCLFVTFPQGSRSVDIWLRVL

SEQ ID NO: 588 - protein, 122 aa, Artificial Sequence
  CD155 v42 IgV
WPPPGTGDVVVQAPTQVPGFLGDSVTLPCYLQVPNMEVTHVSQLTWARHGESGSMAVFHQTYGPSYSESKRLEFVAARLGAELRNASLRMFGLRVEDEGNYTCLFVTFPQGSRSVDIWLRVL

SEQ ID NO: 589 - protein, 122 aa, Artificial Sequence
  CD155 v43 IgV
WPPPGTGDVVVQAPTQVPGFLGDSVTLPCYLQVPNMEVTHVSQLQWARHGEMGSMAVFHQTQGPSYSESKRLEFVAARLGAELRNASLRMFGLRVEDEGNYTCEFVTFPQGSRSVDIWLRVL

SEQ ID NO: 590 - protein, 122 aa, Artificial Sequence
  CD155 v44 IgV
WPPPGTGDVVVQAPTQVPGFLGDSVTLPCYLQVPNMEVTHVNQLTWARHGESGSMAVFHQTQGPSYSESKRLEFVAARLGAELRNASLRMFGLRVEDEGNYTCQFVTFPQRSRSVDIWLRVL

SEQ ID NO: 591 - protein, 122 aa, Artificial Sequence
  CD155 v45 IgV
WPPPGTGDVVVQAPTQVPGFLGDSVTLPCYLQVPNMEVTHVSQLTWARHGEMGSMALFHQTQGPSYSESKRLEFVAARLGAELRNASLRMFGLRVEDEGNYTCLFVTFPQGSRSVDIWLRVL

SEQ ID NO: 592 - protein, 122 aa, Artificial Sequence
  CD155 v46 IgV
WPPPGTGDVVVQAPTQVPGFLGDSVTLPCYLQVPNMEVTHVNQLTWARHGEQGSMAVFHQTFGPSYSESKRLEFVAARLGAELRNASLRMFGLRVEDEGNYTCLFVTFPQGSRSVDIWLRVL

SEQ ID NO: 593 - protein, 122 aa, Artificial Sequence
  CD155 v47 IgV
WPPPGTGDVVVQAPTQVPGFLGDSVTLPCYLQVPNMEVTHVAQLTWARHGELGSMAVFHQTQGPSYSESKRLEFVAARLGAELRNASLRMFGLRVEDEGNYTCEFVTFPQRSRSVDIWLRVL

SEQ ID NO: 594 - protein, 122 aa, Artificial Sequence
  CD155 v48 IgV
WPPPGTGDVVVQAPTQVPGFLGDSVTLPCYLQVPNMEVTHVWQLTWARHGEQGSMALFHQTYGPSYSESKRLEFVAARLGAELRNASLRMFGLRVEDEGNYTCLFVTFPQGSRSVDIWLRVL

SEQ ID NO: 595 - protein, 122 aa, Artificial Sequence
  CD155 v49 IgV
WPPPGTGDVVVQAPTQVPGFLGDSVTLPCYLQVPNMEVTHVSQLTWARHGESGSMAVFHQTQGPSYSESKRLEFVAARLGAELRNASLRMFGLRVEDEGNYTCQFVTFPQGSRSVDIWLRVL

SEQ ID NO: 596 - protein, 122 aa, Artificial Sequence
  CD155 v50 IgV
WPPPGTGDVVVQAPTQVPGFLGDSVTLPCYLQVPNMEVTHVLQLTWARHGEQGSMAVFHQTQGPSYSESKRLEFVAARLGAELRNASLRMFGLRVEDEGNYTCEFVTFPQGSRSVDIWLRVL

SEQ ID NO: 597 - protein, 122 aa, Artificial Sequence
  CD155 v51 IgV
WPPPGTGDVVVQAPTQVPGFLGDSVTLPCYLQVPNMEVTHVCQLTWARHGELGSMAVFHQTQGPSYSESKRLEFVAARLGAELRNASLRMFGLRVEDEGNYTCLFVTFPQGSRSVDIWLRVL

SEQ ID NO: 598 - protein, 122 aa, Artificial Sequence
  CD155 v52 IgV
WPPPGTGDVVVQAPTQVPGFLGDSVTLPCYLQVPNMEVTHVWQLTWARHGERGSMAVFHQTYGPSYSESKRLEFVAARLGAELRNASLRMFGLRVEDEGNYTCQFVTFPQGSRSVDIWLRVL

SEQ ID NO: 599 - protein, 122 aa, Artificial Sequence
  CD155 v53 IgV
WPPPGTGDVVVQAPTQVPGFLGDSVTLPCYLQVPNMEVTHVSQLQWARHGERGSMAVFHQTQGPSYSESKRLEFVAARLGAELRNASLRMFGLRVEDEGNYTCEFVTFPQGSRSVDIWLRVL

SEQ ID NO: 600 - protein, 122 aa, Artificial Sequence
  CD155 v54 IgV
WPPPGTGDVVVQAPTQVPGFLGDSVTLPCYLQVPNMEVTHVSQLTWARHGERGSMAVFHQTFGPSYSESKRLEFVAARLGAELRNASLRMFGLRVEDEGNYTCQFVTFPQRSRSVDIWLRVL

SEQ ID NO: 601 - protein, 122 aa, Artificial Sequence
  CD155 v55 IgV
WPPPGTGDVVVQAPTQVPGFLGDSVTLPCYLQVPNMEVTHVSQLQWARHGELGSMALFHQTQGPSYSESKRLEFVAARLGAELRNASLRMFGLRVEDEGNYTCEFVTFPQGSRSVDIWLRVL

SEQ ID NO: 602 - protein, 122 aa, Artificial Sequence
  CD155 v56 IgV
WPPPGTGDVVVQAPTQVPGFLGDSVTLPCYLQVPNMEVTHVSQLTWARHGEMGSMAVFHQTYGPSYSESKRLEFVAARLGAELRNASLRMFGLRVEDEGNYTCLFVTFPQGSRSVDIWLRVL

SEQ ID NO: 603 - protein, 122 aa, Artificial Sequence
  CD155 v57 IgV
WPPPGTGDVVVQAPTQVPGFLGDSVTLPCYLQVPNMEVTHVSQLTWARHGESGSMAVFHQTFGPSYSESKRLEFVAARLGAELRNASLRMFGLRVEDEGNYTCEFVTFPQRSRSVDIWLRVL

SEQ ID NO: 604 - protein, 122 aa, Artificial Sequence
  CD155 v58 IgV
WPPPGTGDVVVQAPTQVPGFLGDSVTLPCYLQVPNMEVTHVSQLQWARHGEQGSMAVFHQTQGPSYSESKRLEFVAARLGAELRNASLRMFGLRVEDEGNYTCLFVTFPQGSRSVDIWLRVL

SEQ ID NO: 605 - protein, 122 aa, Artificial Sequence
  CD155 v59 IgV
WPPPGTGDVVVQAPTQVPGFLGDSVTLPCYLQVPNMEVTHVSQLTWARHGELGSMAVFHQTQGPSYSESKRLEFVAARLGAELRNASLRMFGLRVEDEGNYTCEFVTFPQGSRSVDIWLRVL

SEQ ID NO: 606 - protein, 122 aa, Artificial Sequence
  CD155 v60 IgV
WPPPGTGDVVVQAPTQVPGFLGDSVTLPCYLQVPNMEVTHVVQLTWARHGEEGSMAVFHQTQGPSYSESKRLEFVAARLGAELRNASLRMFGLRVEDEGNYTCLFVTFPQGSRSVDIWLRVL

SEQ ID NO: 607 - protein, 122 aa, Artificial Sequence
  CD155 v61 IgV
WPPPGTGDVVVQAPTQVPGFLGDSVTLPCYLQVPNMEVTHVSQLQWARHGERGSMAVFHQTQGPSYSESKRLEFVAARLGAELRNASLRMFGLRVEDEGNYTCLFVTFPQRSRSVDIWLRVL

SEQ ID NO: 608 - protein, 122 aa, Artificial Sequence
  CD155 v62 IgV
WPPPGTGDVVVQAPTQVPGFLGDSVTLPCYLQVPNMEVTHVGQLTWARHGEQGSMAVFHQTQGPSYSESKRLEFVAARLGAELRNASLRMFGLRVEDEGNYTCEFVTFPQRSRSVDIWLRVL

SEQ ID NO: 609 - protein, 122 aa, Artificial Sequence
  CD155 v63 IgV
WPPPGTGDVVVQAPTQVPGFLGDSVTLPCYLQVPNMEVTHVNQLTWARHGEEGSMALFHQTQGPSYSESKRLEFVAARLGAELRNASLRMFGLRVEDEGNYTCEFVTFPQGSRSVDIWLRVL

SEQ ID NO: 610 - protein, 122 aa, Artificial Sequence
  CD155 v64 IgV
WPPPGTGDVVVQAPTQVPGFLGDSVTLPCYLQVPNMEVTHVCQLTWARHGEMGSMAVFHQTFGPSYSESKRLEFVAARLGAELRNASLRMFGLRVEDEGNYTCLFVTFPQGSRSVDIWLRVL

SEQ ID NO: 611 - protein, 122 aa, Artificial Sequence
  CD155 v65 IgV
WPPPGTGDVVVQAPTQVPGFLGDSVTLPCYLQVPNMEVTHVLQLTWARHGESGSMAVFHQTQGPSYSESKRLEFVAARLGAELRNASLRMFGLRVEDEGNYTCLFVTFPQGSRSVDIWLRVL

SEQ ID NO: 612 - protein, 122 aa, Artificial Sequence
  CD155 v66 IgV
WPPPGTGDVVVQAPTQVPGFLGDSVTLPCYLQVPNMEVTHVAQLTWARHGESGSMAVFHQTQGPSYSESKRLEFVAARLGAELRNASLRMFGLRVEDEGNYTCLFVTFPQGSRSVDIWLRVL

SEQ ID NO: 613 - protein, 122 aa, Artificial Sequence
  CD155 v67 IgV
WPPPGTGDVVVQAPTQVPGFLGDSVTLPCYLQVPNMEVTHVGQLTWARHGELGSMAVFHQTFGPSYSESKRLEFVAARLGAELRNASLRMFGLRVEDEGNYTCQFVTFPQGSRSVDIWLRVL

SEQ ID NO: 614 - protein, 122 aa, Artificial Sequence
  CD155 v68 IgV
WPPPGTGDVVVQAPTQVPGFLGDSVTLPCYLQVPNMEVTHVNQLTWARHGESGSMAVFHQTQGPSYSESKRLEFVAARLGAELRNASLRMFGLRVEDEGNYTCLFVTFPQGSRSVDIWLRVL

SEQ ID NO: 615 - protein, 122 aa, Artificial Sequence
  CD155 v69 IgV
WPPPGTGDVVVQAPTQVTGFLGDSVTLPCYLQVPNMEVTHVSQLTWARHGESGSMAVFHQTQGPAYVESKRLEFVAARLGAELRNASLRMSGLRVEDEGNYTCLFVTFPQGSRSVDIWLRVL

SEQ ID NO: 616 - protein, 122 aa, Artificial Sequence
  CD155 v70 IgV
WPPPGTGDVVVQAPTQVFGFLGDSVTLPCYLQVPNMEVAHVSQLQWARHGESGSMAVFHQRQGPNYLESKRLGFVAAGLGAELRNASLRMFGLRVEDEGNYTCLFVTFPQGSRSVDIWLRVL

SEQ ID NO: 617 - protein, 122 aa, Artificial Sequence
  CD155 v71 IgV
WPPPGTGDVVVQAPTQVTGFLGDSVTLPCYLQVPNMEVTHVSQLQWARHGESGSMAVFHQRQGPNYLESKRLEFVAARLGAELRNASLRMFGLRVEDEGNYTCLFVTFPQGSRSVDIWLRVL

SEQ ID NO: 618 - protein, 122 aa, Artificial Sequence
  CD155 v72 IgV
WPPPGTGDVVVQAPTQVFGFLGDSVTLPCYLQVPNMEVTHVSQLTWARHGESGSMAVFHQTQGPAYVESKRLEFVAARLGAELRNASLRMSGLRVEDEGNYTCLFVTFPQGSRSVDIWLRVL

SEQ ID NO: 619 - protein, 122 aa, Artificial Sequence
  CD155 v73 IgV
WPPPGTGDVVVQAPTQVFGFLGDSVTLPCYLQVPNMEVTHVSQLQWARHGESGSMAVFHQRQGPNYLESKRLEFVAARLGAELRNASLRMSGLRVEDEGNYTCPFVTFPQGSRSVDIWLRVL

SEQ ID NO: 620 - protein, 122 aa, Artificial Sequence
  CD155 v74 IgV
WPPPGTGDVVVQAPTQVSGFLGDSVTLPCYLQVPNMEVTHVSQLTWARHGESGSMAVFHQTQGPSYSESKRLEFVAARPGAELRNASLRMFGLRVEDEGNYTCMFVTFPQGSRSVDIWLRVL

SEQ ID NO: 621 - protein, 122 aa, Artificial Sequence
  CD155 v75 IgV
WPPPGTGDVVVQAPTQVSGFLGDSVTLPCYLQVPNMEVTHVSQLTWARHGESGSMAVFHQTQGPSYSESKRLEFVAARLGAELRNASLRMFGLRVEDEGNYTCMFVTFPQGSRSVDIWLRVL

SEQ ID NO: 622 - protein, 122 aa, Artificial Sequence
  CD155 v76 IgV
WPPPGTGDVVVQAPTQVPGFLGDSVTLPCYLQVPNMEVTHVSQLTWARHGESGSMAVFHQTQGPSYSESKRLEFVAARPGAELRNASLRMFGLRVEDEGNYTCMFVTFPQGSRSVDIWLRVL

SEQ ID NO: 623 - protein, 122 aa, Artificial Sequence
  CD155 v77 IgV
WPPPGTGDVVVQAPTQVTGFLGDSVTLPCYLQVPNMEVTHVSQLQWARHGESGSMAVFHQTQGPSYSESKRLEFVAARPGAELRNASLRMFGLRVEDEGNYTCLFVTFPQGSRSVDIWLRVL

SEQ ID NO: 624 - protein, 122 aa, Artificial Sequence
  CD155 v78 IgV
WPPPGTGDVVVQAPTQVTGFLGDSVTLPCYLQVPNMEVTHVSQLQWARHGESGSMAVFHQRQGPHYHESKRLEFVAARLGAELRNASLRMFGLRVEDEGNYTCLFVTFPQGSRSVDIWLRVL

SEQ ID NO: 625 - protein, 122 aa, Artificial Sequence
  CD155 v79 IgV
WPPPGTGDVVVQAPTQVTGFLGDSVTLPCYLQVPNMEVTHVSQLTWARHGESGSMAVFHQTQGPSYSESKRLEFVAARLGEELRNASLRMFGLRVEDEGNYTCLFVTFPQGSRSVDIWLRVL

SEQ ID NO: 626 - protein, 122 aa, Artificial Sequence
  CD155 v80 IgV
WPPPGTGDVVVQAPTQVSGFLGYSVTLPCYLQVPNMPVTHVSQLTWARHGEGGSMAVFHQTMGPSYSESKRLEFVAARLSPELRNASLRMFGLRVEDEYNYTCLFVTFPQGNRSVDIWLRVL

SEQ ID NO: 627 - protein, 122 aa, Artificial Sequence
  CD155 v81 IgV
WPPPGTGDVVVQRPTQVPGFLGYSVTLPCYLQVPNMPVTHVPQLTWARHGESGSMAVFHQTYGPSYSESKRLEFVAARLGEELRNASLRMFGLRVEDEGNYTCLFVTFPQGSRSVDIWLRVL

SEQ ID NO: 628 - protein, 122 aa, Artificial Sequence
  CD155 v82 IgV
WPPPGTGDVVVQRPTQVPGFLGYSVTLPCYLQVPNMPVTHVSQLTWARHGESGSMAVFHQTQGPSYSESKRLEFVAARLGAELRNASLRMFGLRVEDEYNYTCLFVTFPQGNRSVDIWLRVL

SEQ ID NO: 629 - protein, 122 aa, Artificial Sequence
  CD155 v83 IgV
WPPPGTGDVVVQRPTQVPGFLGYSVTLPCYLQVPNMPVTHVSQLTWARHGESGSMAVFHQTMGPSYSESKRLEFVAVRLSPELRNASLRMFGLRVEDEYNYTCLFVTFPQGSRSVDIWLRVL

SEQ ID NO: 630 - protein, 122 aa, Artificial Sequence
  CD155 v84 IgV
WPPPGTGDVVVQAPTQVLGFLGDSVTLPCYLQVPNMSVTHVSQLTWARHGESGSMAVFHQTMGPSYSESKRLEFVAARLSPELRNASLRMFGLRVEDEYNYTCLFVTFPQGNRSVDIWLRVL

SEQ ID NO: 631 - protein, 122 aa, Artificial Sequence
  CD155 v85 IgV
WPPPGTGDVVVQAPTQVSGFLGDSVTLPCYLQVPNMEVTHVSQLTWARHGESGSMAVFHQTQGPSYSESKRLEFVAARLGAELRNASLRMFGLRVEDEGNYTCTFVTFPQGSRSVDIWLRVL

SEQ ID NO: 632 - protein, 122 aa, Artificial Sequence
  CD155 v86 IgV
WPPPGTGDVVVQAPTQVSGFLGDSVTLPCYLQVPNMEVTHVSQLTWARHGESGSMAVFHQTHGPSYSESKRLEFVAARQGAELRNASLRMSGLRVEDEGNYTCLFVTFPQGSRSVDIWLRVL

SEQ ID NO: 633 - protein, 122 aa, Artificial Sequence
  CD155 v87 IgV
WPPPGTGDVVVQAPTQVPGFLGDSVTLPCYLQVPNMEVTHVSQLQWARHGEKGSMAVFHQTFGPSYSESKRLEFVAARLGAELRNASLRMFGLRVEDEGNYTCQFVTFPQRSRSVDIWLRVL

SEQ ID NO: 634 - protein, 122 aa, Artificial Sequence
  CD155 v88 IgV
WPPPGTGDVVVQAPTQVPGFLGDSVTLPCYLQVPNMEVTHVSQLQWARHGEQGSMAVFHQTYGPSYSESKRLEFVAARLGAELRNASLRMFGLRVEDEGNYTCQFVTFPQRSRSVDIWLRVL

SEQ ID NO: 635 - protein, 122 aa, Artificial Sequence
  CD155 v89 IgV
WPPPGTGDVVVQAPTQVPGFLGDSVTLPCYLQVPNMEVTHVSQLQWARHGEQGSMAVFHQTYGPSYSESKRLEFVAARLGAELRNASLRMFGLRVEDEGNYTCEFVTFPQRSRSVDIWLRVL

SEQ ID NO: 636 - protein, 122 aa, Artificial Sequence
  CD155 v90 IgV
WPPPGTGDVVVQAPTQVPGFLGDSVTLPCYLQVPNMEVTHVSQLTWARHGESGSMAAFHQMQGPWYAESKRLEFVAARLGAELRNASLRMFGLRVDDEGNYTCTFVTFPQGSRSVDIWLRVL

SEQ ID NO: 637 - protein, 122 aa, Artificial Sequence
  CD155 v91 IgV
WPPPGTGDVVVQAPTQVLGFLGDSVTLPCYLQVPNMEVTHVSQLTWARHGESGSMATFHQSQGPYYAESKRLEFVAARLGAELRNASLRMFGLRVEDEGNYTCTFVTFPQGSRSVDIWLRVL

SEQ ID NO: 638 - protein, 122 aa, Artificial Sequence
  CD155 v92 IgV
WPPPGTGDVVVQAPTQVTGFLGDSVTLPCYLQVPNMEVTHVSQLQWARHGESGSMAVFHQTQGPSYSESKRLEFVAARLGAELRNASLRMFGLRVEDEGNYTCLFVTFPQGSRSVDIWLRVL

SEQ ID NO: 639 - protein, 122 aa, Artificial Sequence
  CD155 v93 IgV
WPPPGTGDVVVQAPTQVLGFLGDSVTLPCYLQVPNMEVTHVSQLTWARHGESGSMAAFHQMQGPWYAESKRLEFVAARLGAELRNASLRMFGLRVEDEGNYTCTFVTFPQGSRSVDIWLRVL

SEQ ID NO: 640 - protein, 122 aa, Artificial Sequence
  CD155 v94 IgV
WPPPGTGDVVVQAPTQVPGFLGDSVTLPCYLQVPNMEVTHVSQLTWARHGESGSMAVFHQMQGPWYAESKRLEFVAARLGAELRNASLRMFGLRVEDEGNYTCTFVTFPQGSRSVDIWLRVL

SEQ ID NO: 641 - protein, 122 aa, Artificial Sequence
  CD155 v95 IgV
WPPPGTGDVVVQAPTQVSGFLGDSVTLPCYLQVPNMEVTHAGQLGWARHGESGSMAVFHQTQGPSYSESKRLEFVAARLGAELRNASLRMFGLRVEDEGNYTCNFVTFPQGSRSVDIWLRVL

SEQ ID NO: 642 - protein, 122 aa, Artificial Sequence
  CD155 v96 IgV
WPPPGTGDVVVQAPTQVHGFLGDSVTLPCYLQVPNMEVTHVGQLIWARHGETRHMALFEQSQGPDYSGSKRLEFVAARLGAELRNASLRMFGLRVEDEGNYTCNFVTFPQGSRSVDIWLRVL

SEQ ID NO: 643 - protein, 122 aa, Artificial Sequence
  CD155 v97 IgV
WPPPGTGDVVVQAPTQVSGFLGDSVTLPCYLQVPNMEVTHVGQLVWARHGESGSMAVLHQTQGPSYWESKRLEFVAARLGAELRNASLRMFGLRVEDEGNYTCNFVTFPQGSRSVDIWLRVL

SEQ ID NO: 644 - protein, 122 aa, Artificial Sequence
  CD155 v98 IgV
WPPPGTGDVVVQAPTQVSGFLGDSVTLPCYLQVPNMEVTHVSQLIWARHGESGSMAVFHQTQGPSYSESKRLEFVAARLGAELRNASLRMFGLRVEDEGNYTCNFVTFPQGSRSVDIWLRVL

SEQ ID NO: 645 - protein, 122 aa, Artificial Sequence
  CD155 v99 IgV
WPPPGTGDVVVQAPTQVSGFLGDSVTLPCYLQVPNMEVTHVGQLGWARHGESGSMAVFHQTQGPSYSESKRLEFVAARLGAELRNASLRMFGLRVEDEGNYTCNFATFPQGSRSVDIWLRVL

SEQ ID NO: 646 - protein, 122 aa, Artificial Sequence
  CD155 v100 IgV
WPPPGTGDVVVQAPTQVHGFLGDSVTLPCYLQVPNMEVTRVGQLIWARHGETRHMALFEQSQGPDYSGSKRLEFVAARLGAELRNASLRMFGLRVEDEGNYTCYFLTHPQGSRSVDIWLRVL

SEQ ID NO: 647 - protein, 122 aa, Artificial Sequence
  CD155 v101 IgV
WPPPGTGDVVVQAPTQVPGFLGDSVTLPCYLQVPNMVVTHVGQLGWARHGESGSMAVFHQTQGPSYSESKRLEFVAARLGAELRNASLRMFGLRVEDEGNYTCNFVTFPQGSRSVDIWLRVL

SEQ ID NO: 648 - protein, 122 aa, Artificial Sequence
  CD155 v102 IgV
WPPPGTGDVVVQAPTQVSGFLGDSVTLPCYLQVPNMEVTHVSQLQWARHGESGSMAVFHQTQGPSYSESKRLEFVAARPGAELRNASLRMFGLRVEDEGNYTCTFVTFPQGSRSVDIWLRVL

SEQ ID NO: 649 - protein, 122 aa, Artificial Sequence
  CD155 v103 IgV
WPPPGTGDVVVQAPTQVLGFLGDSVTLPCYLQVPNMEVTHVSQLTWARHGESGSMAVFHQTRGPSYSESKRLEFVAARLGAELRNASLRMFGLRVEDEGNYTCLFVTFPQGSRSVDIWLRVL

SEQ ID NO: 650 - protein, 122 aa, Artificial Sequence
  CD155 v104 IgV
WPPPGTGDVVVQRPTQVPGFLGYSVTLPCYLQVPNMPVTHVLQLTWARHGEGGSMAVFHQTYGPSYSESKRLEFVAARLGEELRNASLRMFGLRVEDEGNYTCLFVTFPQGSRSVDIWLRVL

SEQ ID NO: 651 - protein, 122 aa, Artificial Sequence
  CD155 v105 IgV
WPPPGTGDVVVQAPTQVLGFLGDSVTLPCYLQVPNMEVTHVSQLTWARRGESGSMAVFHQTQGPSYSESKRLEFVAARLGAELRNASLRMFGLRVEDEGNYTCTFVTFPQGSRSVNIWLRVL

SEQ ID NO: 652 - protein, 122 aa, Artificial Sequence
  CD155 v106 IgV
WPPPGTGDVVVQRPTQVPGFLGYSVTLPCYLQVPNMPVTHVSQLTWARHGESGSMAVFHQTMGPSYSESKRLEFVAARLSPELRNASLRMFGLRVEDEGNYTCTFVTFPQGSRSVDIWLRVL

SEQ ID NO: 653 - protein, 122 aa, Artificial Sequence
  CD155 v107 IgV
WPPPGTGDVVVQAPTQVPGFLGDSVTLPCYLQVPNMEVTHVSQLTWARHGESGSMAVFHQTQGPTYSESKRLEFVAARLGAELRNASLRMFGLRVEDEGNYTCTFVTFPQGSRSVDIWLRVL

SEQ ID NO: 654 - protein, 122 aa, Artificial Sequence
  CD155 v108 IgV
WPPPGTGDVVVQRPTQVPGFLGYSVTLPCYLQVPNMPVTHVSQLTWARHGEGGSMAAFHQTMGPSYSESERLEFVAARLGAELRNASLRMFGLRVEDEGNYTCTFVTFPQGSRSVDIWLRVL

SEQ ID NO: 655 - protein, 122 aa, Artificial Sequence
  CD155 v109 IgV
WPPPGTGDVVVQAPTQVLGFLGDSVTLPCYLQVPNMEVTHVSQLTWVRHGESGSMAVFHQTYGPSYSESKRLDFVAARLGAELRNASLRMFGLRVEDEGNYTCTFVTFPQGSRSVDIWLRVL

SEQ ID NO: 656 - protein, 122 aa, Artificial Sequence
  CD155 v110 IgV
WPPPGTGDVVVQAPTQVPGFLGDSVTLPCYLQVPNMEVTTMSQLTWVRHGEQGSMAVFHQTLGPTYSESKRLRFVAARLGAELRNASLRMFGLRVEGSGNYTCTFVTFPQGSRSVNIWLRVL

SEQ ID NO: 657 - protein, 122 aa, Artificial Sequence
  CD155 v111 IgV
WPPPGTGDVVVQAPTQVLGFLGDSVTLPCYLQVPNMEVTHVPQLQWARHGESGSMAVFHQGQGPHYEESKRLEFVAARLGAELRNASLRMFGLRVEDEGNYTCTFVTFPQGSRSVNIWLRVL

SEQ ID NO: 658 - protein, 122 aa, Artificial Sequence
  CD155 v112 IgV
WPPPGTGDVVVQAPTQVSGFLGDSVTLPCYLQVPNMEVTTMSQLTWVRHGEQGSMAVFHQTLGPTYSESKRLRFVAARLGAELRNASLRMFGLRVEDEGNYTCMFATFPQGSRSVDIWLRVL

SEQ ID NO: 659 - protein, 122 aa, Artificial Sequence
  CD155 v113 IgV
WPPPGTGDVVVQAPTQVPGFLGDSVTLPCYLQVPNMEVTTMSQLTWVRHGEQGSMAVFHQTLGPTYSGSKRLRFVAARLGAELRNASLRMFGLRVEGSGNYTCTFVTFPQGSRSVDIWLRVL

SEQ ID NO: 660 - protein, 122 aa, Artificial Sequence
  CD155 v114 IgV
WPPPGTGDVVVQAPTQVPGFLGDSVTLPCYLQVPNMEVTHVSQLQWARHGEEGSMAVFHQTQGPSYSESKRLEFVAARLGAELRNASLRMFGLRVEDEGNYTCEFVTFPQGSRSVDIWLRVL

SEQ ID NO: 661 - protein, 122 aa, Artificial Sequence
  CD155 v115 IgV
WPPPGTGDVVVQAPTQVPGFLGDSVTLPCYLQVPNMEVTHVSQLQWARHGEEGSMAVFHQTFGPSYSESKRLEFVAARLGAELRNASLRMFGLRVEDEGNYTCEFVTFPQGSRSVDIWLRVL

SEQ ID NO: 662 - protein, 122 aa, Artificial Sequence
  CD155 v116 IgV
WPPPGTGDVVVQAPTQVFGFLGDSVMLPCYLQVPNMEVTHVSQVTWARHGESGSMAVFHQTKGPSYSESKRLEFVAARPGAELRNASLRMSGLRVEDEGNYTCMFVTFPQDSRSVDIWLRVL

SEQ ID NO: 663 - protein, 122 aa, Artificial Sequence
  CD155 v117 IgV
WPPPGTGDVVVQAPTQVSGFLGDSVTLPCYLQVPNMEVTHVSQLSWARHGESGSMAVFHQKQGPWYAESKRLEFVAARLGAELRNASLRMSGLRVEDEGNYTCLFVTFPQRSRSVDIWLRVL

SEQ ID NO: 664 - protein, 122 aa, Artificial Sequence
  CD155 v118 IgV
WPPPGTGDVVVQAPTQVSGFLGDSVTLPCYLQVPNMEVTHVSQLTWARHGESGSMAVFHQTQGPSYSESKRLEFVAARPGAELRNASLRMFGLRVEDEGNYTCMFVMFPQGSRSVDIWLRVL

SEQ ID NO: 665 - protein, 122 aa, Artificial Sequence
  CD155 v119 IgV
WPPPGTGDVVVQAPTQVSGFLGDSVTLPCYLQVPNMEVTHVSQLTWARHGESGSMAVFHQTQGPWYAESKRLEFVAARLGAELRNASLRVFGLRAEDEGNYTCQFVTFPQRSRSVDIWLRVL

SEQ ID NO: 666 - protein, 125 aa, Homo sapiens [sequence omitted]

SEQ ID NO: 667 - protein, 329 aa, Artificial Sequence
  CD112 v1 ECD
QDVRVQVLPEVRGQLGGTVELPCHLLPPVPGLHISLVTWQRPDAPANHQNVAAFHPKMGPSFPSPKPGSERLSFVSAKQSTGQDTEAELQDATLALHGLTVEDEGNYTCEFVTFPKDSVRGMTWLRVIAKPKNQAEAQKVTFSQDPTTVALCISKEGRPPARISWLSSLDWEAKETQVSGTLAGTVTVTSRFTLVPSGRADGVTVTCKVEHESFEEPALIPVTLSVRYPPEVSISGYDDNWYLGRTDATLSCDVRSNPEPTGYDWSTTSGTFPTSAVAQGSQLVIHAVDSLFNTTFVCTVTNAVGMGRAEQVIFVRETPNTAGAGATGG

SEQ ID NO: 668 - protein, 329 aa, Artificial Sequence
  CD112 v2 ECD
QDVRVQVLPEVRGQLGGTAELPCHLLPPVPGLHISLVTWQRPDAPANHQNVAAFHPKMGPSFPGPKPGSERLSFVSAKQGTGQDTEAELQDATLALHSLTVEDEGYYTCEFVTFPKGSVRGMTWLRVIAKPKNQAEAQKVTFSQDPTTVALCISKEGRPPARISWLSSLDWEAKETQVSGTLAGTVTVTSRFTLVPSGRADGVTVTCKVEHESFEEPALIPVTLSVRYPPEVSISGYDDNWYLGRTDATLSCDVRSNPEPTGYDWSTTSGTFPTSAVAQGSQLVIHAVDSLFNTTFVCTVTNAVGMGRAEQVIFVRETPNTAGAGATGG

SEQ ID NO: 669 - protein, 329 aa, Artificial Sequence
  CD112 v3 ECD
QDVRVQVLPEVRGQLGGTVELPCHLLPPVPGPYISLVTWQRPDAPANHQNVAAFHPKMGPSFPSPKPGSERLSFVSAKQSTGQDTEAELQDATLALHGLTVEDEGNYTCEFVTFPKGSVRGMTWLRVIAKPKNQAEAQKVTFSQDPTTVALCISKEGRPPARISWLSSLDWEAKETQVSGTLAGTVTVTSRFTLVPSGRADGVTVTCKVEHESFEEPALIPVTLSVRYPPEVSISGYDDNWYLGRTDATLSCDVRSNPEPTGYDWSTTSGTFPTSAVAQGSQLVIHAVDSLFNTTFVCTVTNAVGMGRAEQVIFVRETPNTAGAGATGG

SEQ ID NO: 670 - protein, 329 aa, Artificial Sequence
  CD112 v4 ECD
QDVRVQVLPEVRGQLGGTVELPCHLLPPVPGLYISLVTWQRPDAPANHQNVAAFHPKMGPSFPSPKPGSERLSFVSAKQSTGQDTEAELQDATLVLHGLTVEDEGNYTCEFITFPKGSVRGMTWLRVIAKPKNQAEAQKVTFSQDPTTVALCISKEGRPPARISWLSSLDWEAKETQVSGTLAGTVTVTSRFTLVPSGRADGVTVTCKVEHESFEEPALIPVTLSVRYPPEVSISGYDDNWYLGRTDATLSCDVRSNPEPTGYDWSTTSGTFPTSAVAQGSQLVIHAVDSLFNTTFVCTVTNAVGMGRAEQVIFVRETPNTAGAGATGG

SEQ ID NO: 671 - protein, 329 aa, Artificial Sequence
  CD112 v5 ECD
QDVRVQVLPEVRGQLGGTVELPCHLLPSVPGLYISLVTWQRPDAPANHQNVAAFHPKMGPSFPSPKPGSERLSFVSAKQSTGQDTEAELQDATLALHGLTVEDEGNYTCEFVTFPKGSVRGMTWLRVIAKPKNQAEAQKVTFSQDPTTVALCISKEGRPPARISWLSSLDWEAKETQVSGTLAGTVTVTSRFTLVPSGRADGVTVTCKVEHESFEEPALIPVTLSVRYPPEVSISGYDDNWYLGRTDATLSCDVRSNPEPTGYDWSTTSGTFPTSAVAQGSQLVIHAVDSLFNTTFVCTVTNAVGMGRAEQVIFVRETPNTAGAGATGG

SEQ ID NO: 672 - protein, 329 aa, Artificial Sequence
  CD112 v6 ECD
QDVRVQVLPEVRGQLGGTVELPCHLLAPVPGLYISLVNWQRPDAPANHQNVAAFHPKMGPSFPSPKPGSERLSFVSAKQSTGQDTEAELQDATLALHGLTAEDEGNYTCEFVTFPKGSVRGMTWLRVIAKPKNQAEAQKVTFSQDPTTVALCISKEGRPPARISWLSSLDWEAKETQVSGTLAGTVTVTSRFTLVPSGRADGVTVTCKVEHESFEEPALIPVTLSVRYPPEVSISGYDDNWYLGRTDATLSCDVRSNPEPTGYDWSTTSGTFPTSAVAQGSQLVIHAVDSLFNTTFVCTVTNAVGMGRAEQVIFVRETPNTAGAGATGG

SEQ ID NO: 673 - protein, 329 aa, Artificial Sequence
  CD112 v7 ECD
QDVRVQVLPEVRGQLGGTVELPCHLLPPVPGLYISLVTWQRPDAPANHQNVAAFHPKMGPSFPSPKPGSERLSFVSAKQSTGQDTEAELQDATLALHGLTVEDEGNYTCEFATFPKGFVRGMTWLRVIAKPKNQAEAQKVTFSQDPTTVALCISKEGRPPARISWLSSLDWEAKETQVSGTLAGTVTVTSRFTLVPSGRADGVTVTCKVEHESFEEPALIPVTLSVRYPPEVSISGYDDNWYLGRTDATLSCDVRSNPEPTGYDWSTTSGTFPTSAVAQGSQLVIHAVDSLFNTTFVCTVTNAVGMGRAEQVIFVRETPNTAGAGATGG

SEQ ID NO: 674 - protein, 329 aa, Artificial Sequence
  CD112 v8 ECD
QDVRVQVLPEVWGQLGGTVELPCHLLPPVPGLYISLVTWQRPDAPANYQNVAASHPKMGPSFPSPKPGSERLSFVSAKQSTGQDTEAELQDATLALHGLTVEDEGNYTCEFATFPKGFVRGMTWLRVIAKPKNQAEAQKVTFSQDPTTVALCISKEGRPPARISWLSSLDWEAKETQVSGTLAGTVTVTSRFTLVPSGRADGVTVTCKVEHESFEEPALIPVTLSVRYPPEVSISGYDDNWYLGRTDATLSCDVRSNPEPTGYDWSTTSGTFPTSAVAQGSQLVIHAVDSLFNTTFVCTVTNAVGMGRAEQVIFVRETPNTAGAGATGG

SEQ ID NO: 675 - protein, 329 aa, Artificial Sequence
  CD112 v9 ECD
QDVRVQVLPEVWGQLGGTVELPCHLLPPVPGLYISLVTWQRPDAPANHQNVAAFHPKMGPSFPSPKPGSERLSFVSAKRSTGQDTEAELQDATLALHGLTVEDEGNYTCEFATFPKGFVRGMTWLRVIAKPKNQAEAQKVTFSQDPTTVALCISKEGRPPARISWLSSLDWEAKETQVSGTLAGTVTVTSRFTLVPSGRADGVTVTCKVEHESFEEPALIPVTLSVRYPPEVSISGYDDNWYLGRTDATLSCDVRSNPEPTGYDWSTTSGTFPTSAVAQGSQLVIHAVDSLFNTTFVCTVTNAVGMGRAEQVIFVRETPNTAGAGATGG

SEQ ID NO: 676 - protein, 329 aa, Artificial Sequence
  CD112 v10 ECD
QDVRVQVLPEVRGQLGGTVELPCHLLPPVPGLYISLVTWQRPDAPANHQNVAAFHPKMGPSFPSPKPGSERLSFVSAKQSTGQDTEAELQDATLALHGLTVEDEGNYTCEFASFPKGYVRGMTWLRVIAKPKNQAEAQKVTFSQDPTTVALCISKEGRPPARISWLSSLDWEAKETQVSGTLAGTVTVTSRFTLVPSGRADGVTVTCKVEHESFEEPALIPVTLSVRYPPEVSISGYDDNWYLGRTDATLSCDVRSNPEPTGYDWSTTSGTFPTSAVAQGSQLVIHAVDSLFNTTFVCTVTNAVGMGRAEQVIFVRETPNTAGAGATGG

SEQ ID NO: 677 - protein, 329 aa, Artificial Sequence
  CD112 v11 ECD
QDVRVQVLPEVRGQLGGTVELPCHLLPPVPGLYISLVTWQRPDAPANHQNVAAFHPKMGPSFPSPKPGSERLSFVSAKQSTGQDTEAELQDATLALHGLTVEDEGNYTCEFATFPKGYVRGMTWLRVIAKPKNQAEAQKVTFSQDPTTVALCISKEGRPPARISWLSSLDWEAKETQVSGTLAGTVTVTSRFTLVPSGRADGVTVTCKVEHESFEEPALIPVTLSVRYPPEVSISGYDDNWYLGRTDATLSCDVRSNPEPTGYDWSTTSGTFPTSAVAQGSQLVIHAVDSLFNTTFVCTVTNAVGMGRAEQVIFVRETPNTAGAGATGG

SEQ ID NO: 678 - protein, 329 aa, Artificial Sequence
  CD112 v12 ECD
QDVRVQVLPEVRGQLGGTVELPCHLLPPVPGLYISLVTWQRPDAPANHQNVAAFHPKMGPSFPSPKPGSERLSFVSAKQSTGQDTEAELQDATLALHGLTVEDEGIYTCEFATFPKGYVRGMTWLRVIAKPKNQAEAQKVTFSQDPTTVALCISKEGRPPARISWLSSLDWEAKETQVSGTLAGTVTVTSRFTLVPSGRADGVTVTCKVEHESFEEPALIPVTLSVRYPPEVSISGYDDNWYLGRTDATLSCDVRSNPEPTGYDWSTTSGTFPTSAVAQGSQLVIHAVDSLFNTTFVCTVTNAVGMGRAEQVIFVRETPNTAGAGATGG

SEQ ID NO: 679 - protein, 329 aa, Artificial Sequence
  CD112 v13 ECD
QDVRVQVLPEVRGQLGGTVELPCHLLPPVPGLYISLVTWQRPDAPANHQNVAAFHPKMGPSFPSPKPGSERLSFVSAKQSTGQDTEAELQDATLALHGLTVEDEGIYTCEFATFPKGFVRGMTWLRVIAKPKNQAEAQKVTFSQDPTTVALCISKEGRPPARISWLSSLDWEAKETQVSGTLAGTVTVTSRFTLVPSGRADGVTVTCKVEHESFEEPALIPVTLSVRYPPEVSISGYDDNWYLGRTDATLSCDVRSNPEPTGYDWSTTSGTFPTSAVAQGSQLVIHAVDSLFNTTFVCTVTNAVGMGRAEQVIFVRETPNTAGAGATGG

SEQ ID NO: 680 - protein, 329 aa, Artificial Sequence
  CD112 v14 ECD
QDVRVQVLPEVRGQLGGTVELPCHLLPPVPGLYISLVTWQRPDAPANHQNVAAFHPKMGPSFPSPKPGSERLSFVSAKQSTGQDTEAELQDATLTPHGLTVEDEGNYTCEFATFPKGYVRGMTWLRVIAKPKNQAEAQKVTFSQDPTTVALCISKEGRPPARISWLSSLDWEAKETQVSGTLAGTVTVTSRFTLVPSGRADGVTVTCKVEHESFEEPALIPVTLSVRYPPEVSISGYDDNWYLGRTDATLSCDVRSNPEPTGYDWSTTSGTFPTSAVAQGSQLVIHAVDSLFNTTFVCTVTNAVGMGRAEQVIFVRETPNTAGAGATGG

SEQ ID NO: 681 - protein, 329 aa, Artificial Sequence
  CD112 v15 ECD
QDVRVQVLPEVRGQLGGTVELPCHLLPPVPGLHISLVTWQRPDAPANHQNVAAFHPKMGPSFPSPKSGSERLSFVSAKQSTGQDTEAELQDATLALHGLTVEDEGYYTCEFVTFPKGSVRGMTWLRVIAKPKNQAEAQKVTFSQDPTTVALCISKEGRPPARISWLSSLDWEAKETQVSGTLAGTVTVTSRFTLVPSGRADGVTVTCKVEHESFEEPALIPVTLSVRYPPEVSISGYDDNWYLGRTDATLSCDVRSNPEPTGYDWSTTSGTFPTSAVAQGSQLVIHAVDSLFNTTFVCTVTNAVGMGRAEQVIFVRETPNTAGAGATGG

SEQ ID NO: 682 - protein, 329 aa, Artificial Sequence
  CD112 v16 ECD
QDVRVQVLPEVRGQLGGTVELPCHLLPPVPGLYISLVTWQRPDAPANHQNVAAFHPKMGPSFPSPKPGSERLSFVSAKQSTGQDTEAELQDATLALHGLTVEDEGYYTCEFVTFPKGSVRGMTWLRVIAKPKNQAEAQKVTFSQDPTTVALCISKEGRPPARISWLSSLDWEAKETQVSGTLAGTVTVTSRFTLVPSGRADGVTVTCKVEHESFEEPALIPVTLSVRYPPEVSISGYDDNWYLGRTDATLSCDVRSNPEPTGYDWSTTSGTFPTSAVAQGSQLVIHAVDSLFNTTFVCTVTNAVGMGRAEQVIFVRETPNTAGAGATGG

SEQ ID NO: 683 - protein, 329 aa, Artificial Sequence
  CD112 v17 ECD
QDVRVQVLPEVRGQLGGSVELPCHLLPPVPGLHISLVTWQRPDAPANHQNVAAFHPKMGPSFPSPKPGSERLSFVSAKQSTGQDTEAELQDATLALHGLTVEDEGNYTCEFVTFPKGSVRGMTWLRVIAKPKNQAEAQKVTFSQDPTTVALCISKEGRPPARISWLSSLDWEAKETQVSGTLAGTVTVTSRFTLVPSGRADGVTVTCKVEHESFEEPALIPVTLSVRYPPEVSISGYDDNWYLGRTDATLSCDVRSNPEPTGYDWSTTSGTFPTSAVAQGSQLVIHAVDSLFNTTFVCTVTNAVGMGRAEQVIFVRETPNTAGAGATGG

SEQ ID NO: 684 - protein, 329 aa, Artificial Sequence
  CD112 v18 ECD
QDVRVQVLSEVRGQLGGTVELPCHLLPPVPGLHISLVTWQRPDAPASHQNVAAFHPKMGPSFPSPKPGSERLSFVSAKQSTGQDTEAELQDATLALHGLTVEDEGNYTCEFVTFPKGSVRGMTWLRVIAKPKNQAEAQKVTFSQDPTTVALCISKEGRPPARISWLSSLDWEAKETQVSGTLAGTVTVTSRFTLVPSGRADGVTVTCKVEHESFEEPALIPVTLSVRYPPEVSISGYDDNWYLGRTDATLSCDVRSNPEPTGYDWSTTSGTFPTSAVAQGSQLVIHAVDSLFNTTFVCTVTNAVGMGRAEQVIFVRETPNTAGAGATGG

SEQ ID NO: 685 - protein, 329 aa, Artificial Sequence
  CD112 v19 ECD
QDVRVQVLPEVRGQLGGTVELPCHLLPPVPGLYISLVTWQRSDAPANHQNVAAFHPKMGPSFPSPKHGSERLSFVSAKQSTGQDTEAELQDATLALHGLTVEDEGNYTCEFVTFPKGSVRGMTWLRVIAKPKNQAEAQKVTFSQDPTTVALCISKEGRPPARISWLSSLDWEAKETQVSGTLAGTVTVTSRFTLVPSGRADGVTVTCKVEHESFEEPALIPVTLSVRYPPEVSISGYDDNWYLGRTDATLSCDVRSNPEPTGYDWSTTSGTFPTSAVAQGSQLVIHAVDSLFNTTFVCTVTNAVGMGRAEQVIFVRETPNTAGAGATGG

SEQ ID NO: 686 - protein, 329 aa, Artificial Sequence
  CD112 v20 ECD
QDVRVQVLPEVRGQLGGTVELPCHLLLPVPGPYISLVTWQRSDAPANHQNVAAFHPKMGPSFPSPKPGSERLSFVSAKQSTGQDTEAELQDATLALHGLTVEDEGNYTCEFVTFPKGSVRGMTWLRVIAKPKNQAEAQKVTFSQDPTTVALCISKEGRPPARISWLSSLDWEAKETQVSGTLAGTVTVTSRFTLVPSGRADGVTVTCKVEHESFEEPALIPVTLSVRYPPEVSISGYDDNWYLGRTDATLSCDVRSNPEPTGYDWSTTSGTFPTSAVAQGSQLVIHAVDSLFNTTFVCTVTNAVGMGRAEQVIFVRETPNTAGAGATGG

SEQ ID NO: 687 - protein, 329 aa, Artificial Sequence
  CD112 v21 ECD
QDVRVQVLPEVRGQLGGTVELPCHLLPPVPGLYISLVTWQRPDAPANHQNVAAFHPKMGPSFPSPKPGSERLSFVSAKQSTGQDTEAELQDATLALHDLTVEDEGNYTCEFVTFPKGSVRGMTWLRVIAKPKNQAEAQKVTFSQDPTTVALCISKEGRPPARISWLSSLDWEAKETQVSGTLAGTVTVTSRFTLVPSGRADGVTVTCKVEHESFEEPALIPVTLSVRYPPEVSISGYDDNWYLGRTDATLSCDVRSNPEPTGYDWSTTSGTFPTSAVAQGSQLVIHAVDSLFNTTFVCTVTNAVGMGRAEQVIFVRETPNTAGAGATGG

SEQ ID NO: 688 - protein, 329 aa, Artificial Sequence
  CD112 v22 ECD
QDVRVQVLPEVRGQLGGTVELPCHLLPPVPGLHIPLVTWQRPDAPANHQNVAAFHPKMGPSFPSPKPGSERLSFVSAKQSTGQDTEAELQDATLALHGLTVEDEGYYTCEFVTFPKGSVRGMTWLRVIAKPKNQAEAQKVTFSQDPTTVALCISKEGRPPARISWLSSLDWEAKETQVSGTLAGTVTVTSRFTLVPSGRADGVTVTCKVEHESFEEPALIPVTLSVRYPPEVSISGYDDNWYLGRTDATLSCDVRSNPEPTGYDWSTTSGTFPTSAVAQGSQLVIHAVDSLFNTTFVCTVTNAVGMGRAEQVIFVRETPNTAGAGATGG

SEQ ID NO: 689 - protein, 329 aa, Artificial Sequence
  CD112 v23 ECD
QDVRVQVLPEVRGQLGGTVELPCHLLPPVPGPYISLVTWQRSDAPANHQNVAAFHPKMGPSFPSPKPGSERLSFVSAKQSTGQDTEAELQDATLALHGLAVEDEGNYTCEFVTFPKGSVRGMTWLRVIAKPKNQAEAQKVTFSQDPTTVALCISKEGRPPARISWLSSLDWEAKETQVSGTLAGTVTVTSRFTLVPSGRADGVTVTCKVEHESFEEPALIPVTLSVRYPPEVSISGYDDNWYLGRTDATLSCDVRSNPEPTGYDWSTTSGTFPTSAVAQGSQLVIHAVDSLFNTTFVCTVTNAVGMGRAEQVIFVRETPNTAGAGATGG

SEQ ID NO: 690 - protein, 329 aa, Artificial Sequence
  CD112 v24 ECD
QDVRVQVLPEVRGQLGGTVELPCHLLSPVPGLYISLVTWQRPDASANHQNVAAFHPKMGPSFPSPKPGSERLSFVSAKQSTGQDTEAELQDATLALHGLTVEDEGIYTCEFVTFPKGSVRGMTWLRVIAKPKNQAEAQKVTFSQDPTTVALCISKEGRPPARISWLSSLDWEAKETQVSGTLAGTVTVTSRFTLVPSGRADGVTVTCKVEHESFEEPALIPVTLSVRYPPEVSISGYDDNWYLGRTDATLSCDVRSNPEPTGYDWSTTSGTFPTSAVAQGSQLVIHAVDSLFNTTFVCTVTNAVGMGRAEQVIFVRETPNTAGAGATGG

SEQ ID NO: 691 - protein, 329 aa, Artificial Sequence
  CD112 v25 ECD
QDVRVQVLPEVRGQLGGTVELPCHLLPPVPGLHISLVTWQRPDAPAKHQNVAAFHPKMGPSFPSPKPGSERLSFVSAKQSTGQDTEAELQDATLALHGLTVEDEGNYTCEFVTFPKGSVRGMTWLRVIAKPKNQAEAQKVTFSQDPTTVALCISKEGRPPARISWLSSLDWEAKETQVSGTLAGTVTVTSRFTLVPSGRADGVTVTCKVEHESFEEPALIPVTLSVRYPPEVSISGYDDNWYLGRTDATLSCDVRSNPEPTGYDWSTTSGTFPTSAVAQGSQLVIHAVDSLFNTTFVCTVTNAVGMGRAEQVIFVRETPNTAGAGATGG

SEQ ID NO: 692 - protein, 329 aa, Artificial Sequence
  CD112 v26 ECD
QDVRVQVLPEVRGQLGGTVELPCHLLPPVPGLHISLVTWQRPDAPANHQNVAAFHPKMGPSFPSPKPGSERLSFVSAKQSTGQDTEAELQDATLALHGLTVEDEGYYTCEFVTFPKGSVRGMTWLRVIAKPKNQAEAQKVTFSQDPTTVALCISKEGRPPARISWLSSLDWEAKETQVSGTLAGTVTVTSRFTLVPSGRADGVTVTCKVEHESFEEPALIPVTLSVRYPPEVSISGYDDNWYLGRTDATLSCDVRSNPEPTGYDWSTTSGTFPTSAVAQGSQLVIHAVDSLFNTTFVCTVTNAVGMGRAEQVIFVRETPNTAGAGATGG

SEQ ID NO: 693 - protein, 329 aa, Artificial Sequence
  CD112 v27 ECD
QDVRVQVLPEVRGQLGGTVELPCHLLPPVPGLYISLVTWQRPDAPANHQNVAAFHPKMGPSFPSPKPGSERLSFVSARQSTGQGTEAELQDATLALHGLTVEDEGNYTCEFVTSPKGSVRGMTWLRVIAKPKNQAEAQKVTFSQDPTTVALCISKEGRPPARISWLSSLDWEAKETQVSGTLAGTVTVTSRFTLVPSGRADGVTVTCKVEHESFEEPALIPVTLSVRYPPEVSISGYDDNWYLGRTDATLSCDVRSNPEPTGYDWSTTSGTFPTSAVAQGSQLVIHAVDSLFNTTFVCTVTNAVGMGRAEQVIFVRETPNTAGAGATGG

SEQ ID NO: 694 - protein, 329 aa, Artificial Sequence
  CD112 v28 ECD
QDVRVQVLPEVRGQLGGTVELPCHLLPPVPGLHISLVTWQRPDAPAKHQNVAALHPKMGPSFPSPKPGSERLSFVSAKQSTGQDTEAELQDATLALHGLTVEDEGNYTCEFVTFPKGSVRGMTWLRVIAKPKNQAEAQKVTFSQDPTTVALCISKEGRPPARISWLSSLDWEAKETQVSGTLAGTVTVTSRFTLVPSGRADGVTVTCKVEHESFEEPALIPVTLSVRYPPEVSISGYDDNWYLGRTDATLSCDVRSNPEPTGYDWSTTSGTFPTSAVAQGSQLVIHAVDSLFNTTFVCTVTNAVGMGRAEQVIFVRETPNTAGAGATGG

SEQ ID NO: 695 - protein, 329 aa, Artificial Sequence
  CD112 v29 ECD
QDVRVQVLPEVRGQLGGTVELPCHLLPPVPGLHISLVTWQRPDAPANHQNVAAFHPKMGPSFPSPKPGSERLSFVSAKQSTGQDTEAELQDATLALHGLTVEDEGNYTCEFVTFPKGSVRGMTWLRVIAKPKNQAEAQKVTFSQDPTTVALCISKEGRPPARISWLSSLDWEAKETQVSGTLAGTVTVTSRFTLVPSGRADGVTVTCKVEHESFEEPALIPVTLSVRYPPEVSISGYDDNWYLGRTDATLSCDVRSNPEPTGYDWSTTSGTFPTSAVAQGSQLVIHAVDSLFNTTFVCTVTNAVGMGRAEQVIFVRETPNTAGAGATGG

SEQ ID NO: 696 - protein, 329 aa, Artificial Sequence
  CD112 v30 ECD
QDVRVQVLPEVRGQLGGTVELPCHLLPPVPGLYISLVTWQRPDAPANHQNVAAFHPKMGPSFPSPKPGSERLSFVSAKQSTGQDTEAELQDATLVLHGLTVEDEGNYTCEFVTFPKGSVRGMTWLRVIAKPKNQAEAQKVTFSQDPTTVALCISKEGRPPARISWLSSLDWEAKETQVSGTLAGTVTVTSRFTLVPSGRADGVTVTCKVEHESFEEPALIPVTLSVRYPPEVSISGYDDNWYLGRTDATLSCDVRSNPEPTGYDWSTTSGTFPTSAVAQGSQLVIHAVDSLFNTTFVCTVTNAVGMGRAEQVIFVRETPNTAGAGATGG

SEQ ID NO: 697 - protein, 329 aa, Artificial Sequence
  CD112 v31 ECD
QDVRVQVLPEVWGQLGGTVELPCHLLPPVPGLYISLVTWQRPDAPANHQNVAAFHPKMGPSFPSPKPGSERLSFVSAKQSTGQDTEAELQDATLALHGLTVEDEGNYTCEFVTFPKGSVRGMTWLRVIAKPKNQAEAQKVTFSQDPTTVALCISKEGRPPARISWLSSLDWEAKETQVSGTLAGTVTVTSRFTLVPSGRADGVTVTCKVEHESFEEPALIPVTLSVRYPPEVSISGYDDNWYLGRTDATLSCDVRSNPEPTGYDWSTTSGTFPTSAVAQGSQLVIHAVDSLFNTTFVCTVTNAVGMGRAEQVIFVRETPNTAGAGATGG

SEQ ID NO: 698 - protein, 329 aa, Artificial Sequence
  CD112 v32 ECD
QDVRVQVLPEVWGQLGGTVELPCHLLSPVPGLYISLVTWQRPDAPANHQNVAAFHPKMGPSFPSPKPGSERLSFVSAKQSTGQDTEAELQDATLALHGLTVEDEGNYTCEFVTFPKGSVRGMTWLRVIAKPKNQAEAQKVTFSQDPTTVALCISKEGRPPARISWLSSLDWEAKETQVSGTLAGTVTVTSRFTLVPSGRADGVTVTCKVEHESFEEPALIPVTLSVRYPPEVSISGYDDNWYLGRTDATLSCDVRSNPEPTGYDWSTTSGTFPTSAVAQGSQLVIHAVDSLFNTTFVCTVTNAVGMGRAEQVIFVRETPNTAGAGATGG

SEQ ID NO: 699 - protein, 329 aa, Artificial Sequence
  CD112 v33 ECD
QDVRVQVLPEVRGQLGGTVELPCHLLPPVPGLHISLVTWQRPDAPANHQNMAAFHPKMGPSFPSPKPGSERLSFVSAKQSTGQDTEAELQDATLALHGLTVEDEGNYTCEFVTFPKGSVRGMTWLRVIAKPKNQAEAQKVTFSQDPTTVALCISKEGRPPARISWLSSLDWEAKETQVSGTLAGTVTVTSRFTLVPSGRADGVTVTCKVEHESFEEPALIPVTLSVRYPPEVSISGYDDNWYLGRTDATLSCDVRSNPEPTGYDWSTTSGTFPTSAVAQGSQLVIHAVDSLFNTTFVCTVTNAVGMGRAEQVIFVRETPNTAGAGATGG

SEQ ID NO: 700 - protein, 329 aa, Artificial Sequence
  CD112 v34 ECD
QDVRVQVLPEVRGQLGGTVELPCHLLPPVPGLHISLVTWQRPDAPANHQNVAAFHPKMGPSFPSPKPGSERLSFVSAKQSTGQDTEAELQDATLALHGLTVEDEGNYTCEFVTFPKGTVRGMTWLRVIAKPKNQAEAQKVTFSQDPTTVALCISKEGRPPARISWLSSLDWEAKETQVSGTLAGTVTVTSRFTLVPSGRADGVTVTCKVEHESFEEPALIPVTLSVRYPPEVSISGYDDNWYLGRTDATLSCDVRSNPEPTGYDWSTTSGTFPTSAVAQGSQLVIHAVDSLFNTTFVCTVTNAVGMGRAEQVIFVRETPNTAGAGATGG

SEQ ID NO: 701 - protein, 329 aa, Artificial Sequence
  CD112 v35 ECD
QDVRVQVLPEVRGQLGGTVELPCHLLPPVPGLHISLVTWQRPDAPANHQNVAAFHPKMGPSFPSPKPGSERLSFVSAKQSTGQDTEAELQDATLALHGLTAEDEGNYTCEFVTFSKGSVRGMTWLRVIAKPKNQAEAQKVTFSQDPTTVALCISKEGRPPARISWLSSLDWEAKETQVSGTLAGTVTVTSRFTLVPSGRADGVTVTCKVEHESFEEPALIPVTLSVRYPPEVSISGYDDNWYLGRTDATLSCDVRSNPEPTGYDWSTTSGTFPTSAVAQGSQLVIHAVDSLFNTTFVCTVTNAVGMGRAEQVIFVRETPNTAGAGATGG

SEQ ID NO: 702 - protein, 329 aa, Artificial Sequence
  CD112 v36 ECD
QDVRVQVLPEVRGQLGGTVELPCRLLPPVPGLYISLVNWQRPGAPANHQNVAAFHPKMGPSFPSPKPGSERLSFVSAKQSTGQDTEAELQDATLALHGLTVEDEGNYTCEFVTFPKGSVRGMTWLRVIAKPKNQAEAQKVTFSQDPTTVALCISKEGRPPARISWLSSLDWEAKETQVSGTLAGTVTVTSRFTLVPSGRADGVTVTCKVEHESFEEPALIPVTLSVRYPPEVSISGYDDNWYLGRTDATLSCDVRSNPEPTGYDWSTTSGTFPTSAVAQGSQLVIHAVDSLFNTTFVCTVTNAVGMGRAEQVIFVRETPNTAGAGATGG

SEQ ID NO: 703 - protein, 329 aa, Artificial Sequence
  CD112 v37 ECD
QDVRVQVLPEVRGQLGGTVELPCHLLPPVPGLYISLVTWQRPDAPANHQNVAAFHPKMGPSFPSPKPGSERLSFVSAKQSTGQDTEAELQDATLALHGLTVEDEGNYTCEFVTFPKGSVRGMTWLRVIAKPKNQAEAQKVTFSQDPTTVALCISKEGRPPARISWLSSLDWEAKETQVSGTLAGTVTVTSRFTLVPSGRADGVTVTCKVEHESFEEPALIPVTLSVRYPPEVSISGYDDNWYLGRTDATLSCDVRSNPEPTGYDWSTTSGTFPTSAVAQGSQLVIHAVDSLFNTTFVCTVTNAVGMGRAEQVIFVRETPNTAGAGATGG

SEQ ID NO: 704 - protein, 329 aa, Artificial Sequence
  CD112 v38 ECD
QDVRVQVLPEVRGQLGGTVELPCHLLAPVPGLYISLVTWQRPDAPANHQNVAAFHPKMGPSFPSPKPGSERLSFVSAKQSTGQDTEAELQDATLALHGLTVEDEGNYTCEFVTFPKGSVRGMTWLRVIAKPKNQAEAQKVTFSQDPTTVALCISKEGRPPARISWLSSLDWEAKETQVSGTLAGTVTVTSRFTLVPSGRADGVTVTCKVEHESFEEPALIPVTLSVRYPPEVSISGYDDNWYLGRTDATLSCDVRSNPEPTGYDWSTTSGTFPTSAVAQGSQLVIHAVDSLFNTTFVCTVTNAVGMGRAEQVIFVRETPNTAGAGATGG

SEQ ID NO: 705 - protein, 329 aa, Artificial Sequence
  CD112 v39 ECD
QDVRVQVLPEVRGQLGGTVELPCHLLPPVPGLYISLVTWQRPDAPANHQNVAAFHPKMGPSFPSPKPGSERLSFVSAKQSTGQDTEAELQDATLALHGLTVEDEGNYTCEFVTFPKGTVRGMTWLRVIAKPKNQAEAQKVTFSQDPTTVALCISKEGRPPARISWLSSLDWEAKETQVSGTLAGTVTVTSRFTLVPSGRADGVTVTCKVEHESFEEPALIPVTLSVRYPPEVSISGYDDNWYLGRTDATLSCDVRSNPEPTGYDWSTTSGTFPTSAVAQGSQLVIHAVDSLFNTTFVCTVTNAVGMGRAEQVIFVRETPNTAGAGATGG

SEQ ID NO: 706 - protein, 329 aa, Artificial Sequence
  CD112 v40 ECD
QDVRVQVLPEVWGQLGGTVELPCHLLPPVPGLYISLVTWQRPDAPANHQNVAAFHPKMGPSFPSPKPGSERLSFVSAKQSTGQDTEAELQDATLALHGLTVEDEGNYTCEFVTFPKGSVRGITWLRVIAKPKNQAEAQKVTFSQDPTTVALCISKEGRPPARISWLSSLDWEAKETQVSGTLAGTVTVTSRFTLVPSGRADGVTVTCKVEHESFEEPALIPVTLSVRYPPEVSISGYDDNWYLGRTDATLSCDVRSNPEPTGYDWSTTSGTFPTSAVAQGSQLVIHAVDSLFNTTFVCTVTNAVGMGRAEQVIFVRETPNTAGAGATGG

SEQ ID NO: 707 - protein, 329 aa, Artificial Sequence
  CD112 v41 ECD
QDVRVQVLPEVRGQLGGTVELPCHLLPPVPGLYISLVTWQRPDAPANHQNVAAFHPKMGPSFPSPKPGSERLSFVSAKQSTGKDTEAELQDATLALHGLTVEDEGYYTCEFVTFPKGSVRGMTWLRVIAKPKNQAEAQKVTFSQDPTTVALCISKEGRPPARISWLSSLDWEAKETQVSGTLAGTVTVTSRFTLVPSGRADGVTVTCKVEHESFEEPALIPVTLSVRYPPEVSISGYDDNWYLGRTDATLSCDVRSNPEPTGYDWSTTSGTFPTSAVAQGSQLVIHAVDSLFNTTFVCTVTNAVGMGRAEQVIFVRETPNTAGAGATGG

SEQ ID NO: 708 - protein, 329 aa, Artificial Sequence
  CD112 v42 ECD
QDVRVQVLPEVWGQLGGTVELPCHLLSPVPGLYISLVTWQRPDAPANHQNVAAFHPKMGPSFPSPKPGSERLSFVSAKQSTGQDTEAELQDATLALHGLTVEDEGNYTCEFVTFPKGTVRGMTWLRVIAKPKNQAEAQKVTFSQDPTTVALCISKEGRPPARISWLSSLDWEAKETQVSGTLAGTVTVTSRFTLVPSGRADGVTVTCKVEHESFEEPALIPVTLSVRYPPEVSISGYDDNWYLGRTDATLSCDVRSNPEPTGYDWSTTSGTFPTSAVAQGSQLVIHAVDSLFNTTFVCTVTNAVGMGRAEQVIFVRETPNTAGAGATGG

SEQ ID NO: 709 - protein, 329 aa, Artificial Sequence
  CD112 v43 ECD
QDVRVQVLPEVRGQLGGTVELPCHLLPSVPGLHISLVTWQRPDAPANHQNVAAFHPKMGPSFPSPKPGSERLSFVSAKQSTGQDTEAELQDATLALHGLTVEDEGNYTCEFVTFPKGSVRGMTWLRVIAKPKNQAEAQKVTFSQDPTTVALCISKEGRPPARISWLSSLDWEAKETQVSGTLAGTVTVTSRFTLVPSGRADGVTVTCKVEHESFEEPALIPVTLSVRYPPEVSISGYDDNWYLGRTDATLSCDVRSNPEPTGYDWSTTSGTFPTSAVAQGSQLVIHAVDSLFNTTFVCTVTNAVGMGRAEQVIFVRETPNTAGAGATGG

SEQ ID NO: 710 - protein, 329 aa, Artificial Sequence
  CD112 v44 ECD
QDVRVQVLPEVRGQLGGTVELPCHLLSPVPGLYISLVTWQRPDAPANHQNVAAFHPKMGPSFPSPKPGSERLSFVSAKQSTGQDTEAELRDATLALHGLTVEDEGNYTCEFVTFPKGSVRGMTWLRVIAKPKNQAEAQKVTFSQDPTTVALCISKEGRPPARISWLSSLDWEAKETQVSGTLAGTVTVTSRFTLVPSGRADGVTVTCKVEHESFEEPALIPVTLSVRYPPEVSISGYDDNWYLGRTDATLSCDVRSNPEPTGYDWSTTSGTFPTSAVAQGSQLVIHAVDSLFNTTFVCTVTNAVGMGRAEQVIFVRETPNTAGAGATGG

SEQ ID NO: 711 - protein, 329 aa, Artificial Sequence
  CD112 v45 ECD
QDVRVQVLPEVRGQVGGTVELPCHLLAPVPGLYISLVTWQRPDAPANHQNVAAFHPKMGPSFPSPKPGSERLSFVSAKQSTGQDTEAELQDATLALHGLTVEDEGNYTCEFVTFPKGTVRGMTWLRVIAKPKNQAEAQKVTFSQDPTTVALCISKEGRPPARISWLSSLDWEAKETQVSGTLAGTVTVTSRFTLVPSGRADGVTVTCKVEHESFEEPALIPVTLSVRYPPEVSISGYDDNWYLGRTDATLSCDVRSNPEPTGYDWSTTSGTFPTSAVAQGSQLVIHAVDSLFNTTFVCTVTNAVGMGRAEQVIFVRETPNTAGAGATGG

SEQ ID NO: 712 - protein, 329 aa, Artificial Sequence
  CD112 v46 ECD
QDVRVQVLPEVRGQLGGTVELPCHLLPPVPGLHISLVTWQRPDAPANHQNVAAFHPKMGPSFPSPKPGSERLSFVSAKQSTGQDTEAELQDATLALHGLTVEDEGYYICEFVTFPKGSVRGMTWLRVIAKPKNQAEAQKVTFSQDPTTVALCISKEGRPPARISWLSSLDWEAKETQVSGTLAGTVTVTSRFTLVPSGRADGVTVTCKVEHESFEEPALIPVTLSVRYPPEVSISGYDDNWYLGRTDATLSCDVRSNPEPTGYDWSTTSGTFPTSAVAQGSQLVIHAVDSLFNTTFVCTVTNAVGMGRAEQVIFVRETPNTAGAGATGG

SEQ ID NO: 713 - protein, 329 aa, Artificial Sequence
  CD112 v47 ECD
QDVRVQVLPEVRGQLGGTVELPCHLLPPVPGLHISLVTWQRPDAPANHQNVAAFHLKMGPSFPSPKPGSERLSFMSAKQSTGQDTEAELQDATLALHGLTMEDEGNYTCEFVTFPKGSVRGMTWLRVIAKPKNQAEAQKVTFSQDPTTVALCISKEGRPPARISWLSSLDWEAKETQVSGTLAGTVTVTSRFTLVPSGRADGVTVTCKVEHESFEEPALIPVTLSVRYPPEVSISGYDDNWYLGRTDATLSCDVRSNPEPTGYDWSTTSGTFPTSAVAQGSQLVIHAVDSLFNTTFVCTVTNAVGMGRAEQVIFVRETPNTAGAGATGG

SEQ ID NO: 714 - protein, 125 aa, Artificial Sequence
  CD112 v1 IgV
QDVRVQVLPEVRGQLGGTVELPCHLLPPVPGLHISLVTWQRPDAPANHQNVAAFHPKMGPSFPSPKPGSERLSFVSAKQSTGQDTEAELQDATLALHGLTVEDEGNYTCEFVTFPKDSVRGMTWL

SEQ ID NO: 715 - protein, 125 aa, Artificial Sequence
  CD112 v2 IgV
QDVRVQVLPEVRGQLGGTAELPCHLLPPVPGLHISLVTWQRPDAPANHQNVAAFHPKMGPSFPGPKPGSERLSFVSAKQGTGQDTEAELQDATLALHSLTVEDEGYYTCEFVTFPKGSVRGMTWL

SEQ ID NO: 716 - protein, 125 aa, Artificial Sequence
  CD112 v3 IgV
QDVRVQVLPEVRGQLGGTVELPCHLLPPVPGPYISLVTWQRPDAPANHQNVAAFHPKMGPSFPSPKPGSERLSFVSAKQSTGQDTEAELQDATLALHGLTVEDEGNYTCEFVTFPKGSVRGMTWL

SEQ ID NO: 717 - protein, 125 aa, Artificial Sequence
  CD112 v4 IgV
QDVRVQVLPEVRGQLGGTVELPCHLLPPVPGLYISLVTWQRPDAPANHQNVAAFHPKMGPSFPSPKPGSERLSFVSAKQSTGQDTEAELQDATLVLHGLTVEDEGNYTCEFITFPKGSVRGMTWL

SEQ ID NO: 718 - protein, 125 aa, Artificial Sequence
  CD112 v5 IgV
QDVRVQVLPEVRGQLGGTVELPCHLLPSVPGLYISLVTWQRPDAPANHQNVAAFHPKMGPSFPSPKPGSERLSFVSAKQSTGQDTEAELQDATLALHGLTVEDEGNYTCEFVTFPKGSVRGMTWL

SEQ ID NO: 719 - protein, 125 aa, Artificial Sequence
  CD112 v6 IgV
QDVRVQVLPEVRGQLGGTVELPCHLLAPVPGLYISLVNWQRPDAPANHQNVAAFHPKMGPSFPSPKPGSERLSFVSAKQSTGQDTEAELQDATLALHGLTAEDEGNYTCEFVTFPKGSVRGMTWL

SEQ ID NO: 720 - protein, 125 aa, Artificial Sequence
  CD112 v7 IgV
QDVRVQVLPEVRGQLGGTVELPCHLLPPVPGLYISLVTWQRPDAPANHQNVAAFHPKMGPSFPSPKPGSERLSFVSAKQSTGQDTEAELQDATLALHGLTVEDEGNYTCEFATFPKGFVRGMTWL

SEQ ID NO: 721 - protein, 125 aa, Artificial Sequence
  CD112 v8 IgV
QDVRVQVLPEVWGQLGGTVELPCHLLPPVPGLYISLVTWQRPDAPANYQNVAASHPKMGPSFPSPKPGSERLSFVSAKQSTGQDTEAELQDATLALHGLTVEDEGNYTCEFATFPKGFVRGMTWL

SEQ ID NO: 722 - protein, 125 aa, Artificial Sequence
  CD112 v9 IgV
QDVRVQVLPEVWGQLGGTVELPCHLLPPVPGLYISLVTWQRPDAPANHQNVAAFHPKMGPSFPSPKPGSERLSFVSAKRSTGQDTEAELQDATLALHGLTVEDEGNYTCEFATFPKGFVRGMTWL

SEQ ID NO: 723 - protein, 125 aa, Artificial Sequence
  CD112 v10 IgV
QDVRVQVLPEVRGQLGGTVELPCHLLPPVPGLYISLVTWQRPDAPANHQNVAAFHPKMGPSFPSPKPGSERLSFVSAKQSTGQDTEAELQDATLALHGLTVEDEGNYTCEFASFPKGYVRGMTWL

SEQ ID NO: 724 - protein, 125 aa, Artificial Sequence
  CD112 v11 IgV
QDVRVQVLPEVRGQLGGTVELPCHLLPPVPGLYISLVTWQRPDAPANHQNVAAFHPKMGPSFPSPKPGSERLSFVSAKQSTGQDTEAELQDATLALHGLTVEDEGNYTCEFATFPKGYVRGMTWL

SEQ ID NO: 725 - protein, 125 aa, Artificial Sequence
  CD112 v12 IgV
QDVRVQVLPEVRGQLGGTVELPCHLLPPVPGLYISLVTWQRPDAPANHQNVAAFHPKMGPSFPSPKPGSERLSFVSAKQSTGQDTEAELQDATLALHGLTVEDEGIYTCEFATFPKGYVRGMTWL

SEQ ID NO: 726 - protein, 125 aa, Artificial Sequence
  CD112 v13 IgV
QDVRVQVLPEVRGQLGGTVELPCHLLPPVPGLYISLVTWQRPDAPANHQNVAAFHPKMGPSFPSPKPGSERLSFVSAKQSTGQDTEAELQDATLALHGLTVEDEGIYTCEFATFPKGFVRGMTWL

SEQ ID NO: 727 - protein, 125 aa, Artificial Sequence
  CD112 v14 IgV
QDVRVQVLPEVRGQLGGTVELPCHLLPPVPGLYISLVTWQRPDAPANHQNVAAFHPKMGPSFPSPKPGSERLSFVSAKQSTGQDTEAELQDATLTPHGLTVEDEGNYTCEFATFPKGYVRGMTWL

SEQ ID NO: 728 - protein, 125 aa, Artificial Sequence
  CD112 v15 IgV
QDVRVQVLPEVRGQLGGTVELPCHLLPPVPGLHISLVTWQRPDAPANHQNVAAFHPKMGPSFPSPKSGSERLSFVSAKQSTGQDTEAELQDATLALHGLTVEDEGYYTCEFVTFPKGSVRGMTWL

SEQ ID NO: 729 - protein, 125 aa, Artificial Sequence
  CD112 v16 IgV
QDVRVQVLPEVRGQLGGTVELPCHLLPPVPGLYISLVTWQRPDAPANHQNVAAFHPKMGPSFPSPKPGSERLSFVSAKQSTGQDTEAELQDATLALHGLTVEDEGYYTCEFVTFPKGSVRGMTWL

SEQ ID NO: 730 - protein, 125 aa, Artificial Sequence
  CD112 v17 IgV
QDVRVQVLPEVRGQLGGSVELPCHLLPPVPGLHISLVTWQRPDAPANHQNVAAFHPKMGPSFPSPKPGSERLSFVSAKQSTGQDTEAELQDATLALHGLTVEDEGNYTCEFVTFPKGSVRGMTWL

SEQ ID NO: 731 - protein, 125 aa, Artificial Sequence
  CD112 v18 IgV
QDVRVQVLSEVRGQLGGTVELPCHLLPPVPGLHISLVTWQRPDAPASHQNVAAFHPKMGPSFPSPKPGSERLSFVSAKQSTGQDTEAELQDATLALHGLTVEDEGNYTCEFVTFPKGSVRGMTWL

SEQ ID NO: 732 - protein, 125 aa, Artificial Sequence
  CD112 v19 IgV
QDVRVQVLPEVRGQLGGTVELPCHLLPPVPGLYISLVTWQRSDAPANHQNVAAFHPKMGPSFPSPKHGSERLSFVSAKQSTGQDTEAELQDATLALHGLTVEDEGNYTCEFVTFPKGSVRGMTWL

SEQ ID NO: 733 - protein, 125 aa, Artificial Sequence
  CD112 v20 IgV
QDVRVQVLPEVRGQLGGTVELPCHLLLPVPGPYISLVTWQRSDAPANHQNVAAFHPKMGPSFPSPKPGSERLSFVSAKQSTGQDTEAELQDATLALHGLTVEDEGNYTCEFVTFPKGSVRGMTWL

SEQ ID NO: 734 - protein, 125 aa, Artificial Sequence
  CD112 v21 IgV
QDVRVQVLPEVRGQLGGTVELPCHLLPPVPGLYISLVTWQRPDAPANHQNVAAFHPKMGPSFPSPKPGSERLSFVSAKQSTGQDTEAELQDATLALHDLTVEDEGNYTCEFVTFPKGSVRGMTWL

SEQ ID NO: 735 - protein, 125 aa, Artificial Sequence
  CD112 v22 IgV
QDVRVQVLPEVRGQLGGTVELPCHLLPPVPGLHIPLVTWQRPDAPANHQNVAAFHPKMGPSFPSPKPGSERLSFVSAKQSTGQDTEAELQDATLALHGLTVEDEGYYTCEFVTFPKGSVRGMTWL

SEQ ID NO: 736 - protein, 125 aa, Artificial Sequence
  CD112 v23 IgV
QDVRVQVLPEVRGQLGGTVELPCHLLPPVPGPYISLVTWQRSDAPANHQNVAAFHPKMGPSFPSPKPGSERLSFVSAKQSTGQDTEAELQDATLALHGLAVEDEGNYTCEFVTFPKGSVRGMTWL

SEQ ID NO: 737 - protein, 125 aa, Artificial Sequence
  CD112 v24 IgV
QDVRVQVLPEVRGQLGGTVELPCHLLSPVPGLYISLVTWQRPDASANHQNVAAFHPKMGPSFPSPKPGSERLSFVSAKQSTGQDTEAELQDATLALHGLTVEDEGIYTCEFVTFPKGSVRGMTWL

SEQ ID NO: 738 - protein, 125 aa, Artificial Sequence
  CD112 v25 IgV
QDVRVQVLPEVRGQLGGTVELPCHLLPPVPGLHISLVTWQRPDAPAKHQNVAAFHPKMGPSFPSPKPGSERLSFVSAKQSTGQDTEAELQDATLALHGLTVEDEGNYTCEFVTFPKGSVRGMTWL

SEQ ID NO: 739 - protein, 125 aa, Artificial Sequence
  CD112 v26 IgV
QDVRVQVLPEVRGQLGGTVELPCHLLPPVPGLHISLVTWQRPDAPANHQNVAAFHPKMGPSFPSPKPGSERLSFVSAKQSTGQDTEAELQDATLALHGLTVEDEGYYTCEFVTFPKGSVRGMTWL

SEQ ID NO: 740 - protein, 125 aa, Artificial Sequence
  CD112 v27 IgV
QDVRVQVLPEVRGQLGGTVELPCHLLPPVPGLYISLVTWQRPDAPANHQNVAAFHPKMGPSFPSPKPGSERLSFVSARQSTGQGTEAELQDATLALHGLTVEDEGNYTCEFVTSPKGSVRGMTWL

SEQ ID NO: 741 - protein, 125 aa, Artificial Sequence
  CD112 v28 IgV
QDVRVQVLPEVRGQLGGTVELPCHLLPPVPGLHISLVTWQRPDAPAKHQNVAALHPKMGPSFPSPKPGSERLSFVSAKQSTGQDTEAELQDATLALHGLTVEDEGNYTCEFVTFPKGSVRGMTWL

SEQ ID NO: 742 - protein, 125 aa, Artificial Sequence
  CD112 v29 IgV
QDVRVQVLPEVRGQLGGTVELPCHLLPPVPGLHISLVTWQRPDAPANHQNVAAFHPKMGPSFPSPKPGSERLSFVSAKQSTGQDTEAELQDATLALHGLTVEDEGNYTCEFVTFPKGSVRGMTWL

SEQ ID NO: 743 - protein, 125 aa, Artificial Sequence
  CD112 v30 IgV
QDVRVQVLPEVRGQLGGTVELPCHLLPPVPGLYISLVTWQRPDAPANHQNVAAFHPKMGPSFPSPKPGSERLSFVSAKQSTGQDTEAELQDATLVLHGLTVEDEGNYTCEFVTFPKGSVRGMTWL

SEQ ID NO: 744 - protein, 125 aa, Artificial Sequence
  CD112 v31 IgV
QDVRVQVLPEVWGQLGGTVELPCHLLPPVPGLYISLVTWQRPDAPANHQNVAAFHPKMGPSFPSPKPGSERLSFVSAKQSTGQDTEAELQDATLALHGLTVEDEGNYTCEFVTFPKGSVRGMTWL

SEQ ID NO: 745 - protein, 125 aa, Artificial Sequence
  CD112 v32 IgV
QDVRVQVLPEVWGQLGGTVELPCHLLSPVPGLYISLVTWQRPDAPANHQNVAAFHPKMGPSFPSPKPGSERLSFVSAKQSTGQDTEAELQDATLALHGLTVEDEGNYTCEFVTFPKGSVRGMTWL

SEQ ID NO: 746 - protein, 125 aa, Artificial Sequence
  CD112 v33 IgV
QDVRVQVLPEVRGQLGGTVELPCHLLPPVPGLHISLVTWQRPDAPANHQNMAAFHPKMGPSFPSPKPGSERLSFVSAKQSTGQDTEAELQDATLALHGLTVEDEGNYTCEFVTFPKGSVRGMTWL

SEQ ID NO: 747 - protein, 125 aa, Artificial Sequence
  CD112 v34 IgV
QDVRVQVLPEVRGQLGGTVELPCHLLPPVPGLHISLVTWQRPDAPANHQNVAAFHPKMGPSFPSPKPGSERLSFVSAKQSTGQDTEAELQDATLALHGLTVEDEGNYTCEFVTFPKGTVRGMTWL

SEQ ID NO: 748 - protein, 125 aa, Artificial Sequence
  CD112 v35 IgV
QDVRVQVLPEVRGQLGGTVELPCHLLPPVPGLHISLVTWQRPDAPANHQNVAAFHPKMGPSFPSPKPGSERLSFVSAKQSTGQDTEAELQDATLALHGLTAEDEGNYTCEFVTFSKGSVRGMTWL

SEQ ID NO: 749 - protein, 125 aa, Artificial Sequence
  CD112 v36 IgV
QDVRVQVLPEVRGQLGGTVELPCRLLPPVPGLYISLVNWQRPGAPANHQNVAAFHPKMGPSFPSPKPGSERLSFVSAKQSTGQDTEAELQDATLALHGLTVEDEGNYTCEFVTFPKGSVRGMTWL

SEQ ID NO: 750 - protein, 125 aa, Artificial Sequence
  CD112 v37 IgV
QDVRVQVLPEVRGQLGGTVELPCHLLPPVPGLYISLVTWQRPDAPANHQNVAAFHPKMGPSFPSPKPGSERLSFVSAKQSTGQDTEAELQDATLALHGLTVEDEGNYTCEFVTFPKGSVRGMTWL

SEQ ID NO: 751 - protein, 125 aa, Artificial Sequence
  CD112 v38 IgV
QDVRVQVLPEVRGQLGGTVELPCHLLAPVPGLYISLVTWQRPDAPANHQNVAAFHPKMGPSFPSPKPGSERLSFVSAKQSTGQDTEAELQDATLALHGLTVEDEGNYTCEFVTFPKGSVRGMTWL

SEQ ID NO: 752 - protein, 125 aa, Artificial Sequence
  CD112 v39 IgV
QDVRVQVLPEVRGQLGGTVELPCHLLPPVPGLYISLVTWQRPDAPANHQNVAAFHPKMGPSFPSPKPGSERLSFVSAKQSTGQDTEAELQDATLALHGLTVEDEGNYTCEFVTFPKGTVRGMTWL

SEQ ID NO: 753 - protein, 125 aa, Artificial Sequence
  CD112 v40 IgV
QDVRVQVLPEVWGQLGGTVELPCHLLPPVPGLYISLVTWQRPDAPANHQNVAAFHPKMGPSFPSPKPGSERLSFVSAKQSTGQDTEAELQDATLALHGLTVEDEGNYTCEFVTFPKGSVRGITWL

SEQ ID NO: 754 - protein, 125 aa, Artificial Sequence
  CD112 v41 IgV
QDVRVQVLPEVRGQLGGTVELPCHLLPPVPGLYISLVTWQRPDAPANHQNVAAFHPKMGPSFPSPKPGSERLSFVSAKQSTGKDTEAELQDATLALHGLTVEDEGYYTCEFVTFPKGSVRGMTWL

SEQ ID NO: 755 - protein, 125 aa, Artificial Sequence
  CD112 v42 IgV
QDVRVQVLPEVWGQLGGTVELPCHLLSPVPGLYISLVTWQRPDAPANHQNVAAFHPKMGPSFPSPKPGSERLSFVSAKQSTGQDTEAELQDATLALHGLTVEDEGNYTCEFVTFPKGTVRGMTWL

SEQ ID NO: 756 - protein, 125 aa, Artificial Sequence
  CD112 v43 IgV
QDVRVQVLPEVRGQLGGTVELPCHLLPSVPGLHISLVTWQRPDAPANHQNVAAFHPKMGPSFPSPKPGSERLSFVSAKQSTGQDTEAELQDATLALHGLTVEDEGNYTCEFVTFPKGSVRGMTWL

SEQ ID NO: 757 - protein, 125 aa, Artificial Sequence
  CD112 v44 IgV
QDVRVQVLPEVRGQLGGTVELPCHLLSPVPGLYISLVTWQRPDAPANHQNVAAFHPKMGPSFPSPKPGSERLSFVSAKQSTGQDTEAELRDATLALHGLTVEDEGNYTCEFVTFPKGSVRGMTWL

SEQ ID NO: 758 - protein, 125 aa, Artificial Sequence
  CD112 v45 IgV
QDVRVQVLPEVRGQVGGTVELPCHLLAPVPGLYISLVTWQRPDAPANHQNVAAFHPKMGPSFPSPKPGSERLSFVSAKQSTGQDTEAELQDATLALHGLTVEDEGNYTCEFVTFPKGTVRGMTWL

SEQ ID NO: 759 - protein, 125 aa, Artificial Sequence
  CD112 v46 IgV
QDVRVQVLPEVRGQLGGTVELPCHLLPPVPGLHISLVTWQRPDAPANHQNVAAFHPKMGPSFPSPKPGSERLSFVSAKQSTGQDTEAELQDATLALHGLTVEDEGYYICEFVTFPKGSVRGMTWL

SEQ ID NO: 760 - protein, 125 aa, Artificial Sequence
  CD112 v47 IgV
QDVRVQVLPEVRGQLGGTVELPCHLLPPVPGLHISLVTWQRPDAPANHQNVAAFHLKMGPSFPSPKPGSERLSFMSAKQSTGQDTEAELQDATLALHGLTMEDEGNYTCEFVTFPKGSVRGMTWL

SEQ ID NO: 761 - protein, 127 aa, Homo sapiens
  MISC_FEATURE: CD112 IgV Wildtype
QDVRVQVLPEVRGQLGGTVELPCHLLPPVPGLYISLVTWQRPDAPANHQNVAAFHPKMGPSFPSPKPGSERLSFVSAKQSTGQDTEAELQDATLALHGLTVEDEGNYTCEFATFPKGSVRGMTWLRV

SEQ ID NO: 762 - protein, 127 aa, Artificial Sequence
  CD112 v1 IgV
QDVRVQVLPEVRGQLGGTVELPCHLLPPVPGLHISLVTWQRPDAPANHQNVAAFHPKMGPSFPSPKPGSERLSFVSAKQSTGQDTEAELQDATLALHGLTVEDEGNYTCEFVTFPKDSVRGMTWLRV

SEQ ID NO: 763 - protein, 127 aa, Artificial Sequence
  CD112 v2 IgV
QDVRVQVLPEVRGQLGGTAELPCHLLPPVPGLHISLVTWQRPDAPANHQNVAAFHPKMGPSFPGPKPGSERLSFVSAKQGTGQDTEAELQDATLALHSLTVEDEGYYTCEFVTFPKGSVRGMTWLRV

SEQ ID NO: 764 - protein, 127 aa, Artificial Sequence
  CD112 v3 IgV
QDVRVQVLPEVRGQLGGTVELPCHLLPPVPGPYISLVTWQRPDAPANHQNVAAFHPKMGPSFPSPKPGSERLSFVSAKQSTGQDTEAELQDATLALHGLTVEDEGNYTCEFVTFPKGSVRGMTWLRV

SEQ ID NO: 765 - protein, 127 aa, Artificial Sequence
  CD112 v4 IgV
QDVRVQVLPEVRGQLGGTVELPCHLLPPVPGLYISLVTWQRPDAPANHQNVAAFHPKMGPSFPSPKPGSERLSFVSAKQSTGQDTEAELQDATLVLHGLTVEDEGNYTCEFITFPKGSVRGMTWLRV

SEQ ID NO: 766 - protein, 127 aa, Artificial Sequence
  CD112 v5 IgV
QDVRVQVLPEVRGQLGGTVELPCHLLPSVPGLYISLVTWQRPDAPANHQNVAAFHPKMGPSFPSPKPGSERLSFVSAKQSTGQDTEAELQDATLALHGLTVEDEGNYTCEFVTFPKGSVRGMTWLRV

SEQ ID NO: 767 - protein, 127 aa, Artificial Sequence
  CD112 v6 IgV
QDVRVQVLPEVRGQLGGTVELPCHLLAPVPGLYISLVNWQRPDAPANHQNVAAFHPKMGPSFPSPKPGSERLSFVSAKQSTGQDTEAELQDATLALHGLTAEDEGNYTCEFVTFPKGSVRGMTWLRV

SEQ ID NO: 768 - protein, 127 aa, Artificial Sequence
  CD112 v7 IgV
QDVRVQVLPEVRGQLGGTVELPCHLLPPVPGLYISLVTWQRPDAPANHQNVAAFHPKMGPSFPSPKPGSERLSFVSAKQSTGQDTEAELQDATLALHGLTVEDEGNYTCEFATFPKGFVRGMTWLRV

SEQ ID NO: 769 - protein, 127 aa, Artificial Sequence
  CD112 v8 IgV
QDVRVQVLPEVWGQLGGTVELPCHLLPPVPGLYISLVTWQRPDAPANYQNVAASHPKMGPSFPSPKPGSERLSFVSAKQSTGQDTEAELQDATLALHGLTVEDEGNYTCEFATFPKGFVRGMTWLRV

SEQ ID NO: 770 - protein, 127 aa, Artificial Sequence
  CD112 v9 IgV
QDVRVQVLPEVWGQLGGTVELPCHLLPPVPGLYISLVTWQRPDAPANHQNVAAFHPKMGPSFPSPKPGSERLSFVSAKRSTGQDTEAELQDATLALHGLTVEDEGNYTCEFATFPKGFVRGMTWLRV

SEQ ID NO: 771 - protein, 127 aa, Artificial Sequence
  CD112 v10 IgV
QDVRVQVLPEVRGQLGGTVELPCHLLPPVPGLYISLVTWQRPDAPANHQNVAAFHPKMGPSFPSPKPGSERLSFVSAKQSTGQDTEAELQDATLALHGLTVEDEGNYTCEFASFPKGYVRGMTWLRV

SEQ ID NO: 772 - protein, 127 aa, Artificial Sequence
  CD112 v11 IgV
QDVRVQVLPEVRGQLGGTVELPCHLLPPVPGLYISLVTWQRPDAPANHQNVAAFHPKMGPSFPSPKPGSERLSFVSAKQSTGQDTEAELQDATLALHGLTVEDEGNYTCEFATFPKGYVRGMTWLRV

SEQ ID NO: 773 - protein, 127 aa, Artificial Sequence
  CD112 v12 IgV
QDVRVQVLPEVRGQLGGTVELPCHLLPPVPGLYISLVTWQRPDAPANHQNVAAFHPKMGPSFPSPKPGSERLSFVSAKQSTGQDTEAELQDATLALHGLTVEDEGIYTCEFATFPKGYVRGMTWLRV

SEQ ID NO: 774 - protein, 127 aa, Artificial Sequence
  CD112 v13 IgV
QDVRVQVLPEVRGQLGGTVELPCHLLPPVPGLYISLVTWQRPDAPANHQNVAAFHPKMGPSFPSPKPGSERLSFVSAKQSTGQDTEAELQDATLALHGLTVEDEGIYTCEFATFPKGFVRGMTWLRV

SEQ ID NO: 775 - protein, 127 aa, Artificial Sequence
  CD112 v14 IgV
QDVRVQVLPEVRGQLGGTVELPCHLLPPVPGLYISLVTWQRPDAPANHQNVAAFHPKMGPSFPSPKPGSERLSFVSAKQSTGQDTEAELQDATLTPHGLTVEDEGNYTCEFATFPKGYVRGMTWLRV

SEQ ID NO: 776 - protein, 127 aa, Artificial Sequence
  CD112 v15 IgV
QDVRVQVLPEVRGQLGGTVELPCHLLPPVPGLHISLVTWQRPDAPANHQNVAAFHPKMGPSFPSPKSGSERLSFVSAKQSTGQDTEAELQDATLALHGLTVEDEGYYTCEFVTFPKGSVRGMTWLRV

SEQ ID NO: 777 - protein, 127 aa, Artificial Sequence
  CD112 v16 IgV
QDVRVQVLPEVRGQLGGTVELPCHLLPPVPGLYISLVTWQRPDAPANHQNVAAFHPKMGPSFPSPKPGSERLSFVSAKQSTGQDTEAELQDATLALHGLTVEDEGYYTCEFVTFPKGSVRGMTWLRV

SEQ ID NO: 778 - protein, 127 aa, Artificial Sequence
  CD112 v17 IgV
QDVRVQVLPEVRGQLGGSVELPCHLLPPVPGLHISLVTWQRPDAPANHQNVAAFHPKMGPSFPSPKPGSERLSFVSAKQSTGQDTEAELQDATLALHGLTVEDEGNYTCEFVTFPKGSVRGMTWLRV

SEQ ID NO: 779 - protein, 127 aa, Artificial Sequence
  CD112 v18 IgV
QDVRVQVLSEVRGQLGGTVELPCHLLPPVPGLHISLVTWQRPDAPASHQNVAAFHPKMGPSFPSPKPGSERLSFVSAKQSTGQDTEAELQDATLALHGLTVEDEGNYTCEFVTFPKGSVRGMTWLRV

SEQ ID NO: 780 - protein, 127 aa, Artificial Sequence
  CD112 v19 IgV
QDVRVQVLPEVRGQLGGTVELPCHLLPPVPGLYISLVTWQRSDAPANHQNVAAFHPKMGPSFPSPKHGSERLSFVSAKQSTGQDTEAELQDATLALHGLTVEDEGNYTCEFVTFPKGSVRGMTWLRV

SEQ ID NO: 781 - protein, 127 aa, Artificial Sequence
  CD112 v20 IgV
QDVRVQVLPEVRGQLGGTVELPCHLLLPVPGPYISLVTWQRSDAPANHQNVAAFHPKMGPSFPSPKPGSERLSFVSAKQSTGQDTEAELQDATLALHGLTVEDEGNYTCEFVTFPKGSVRGMTWLRV

SEQ ID NO: 782 - protein, 127 aa, Artificial Sequence
  CD112 v21 IgV
QDVRVQVLPEVRGQLGGTVELPCHLLPPVPGLYISLVTWQRPDAPANHQNVAAFHPKMGPSFPSPKPGSERLSFVSAKQSTGQDTEAELQDATLALHDLTVEDEGNYTCEFVTFPKGSVRGMTWLRV

SEQ ID NO: 783 - protein, 127 aa, Artificial Sequence
  CD112 v22 IgV
QDVRVQVLPEVRGQLGGTVELPCHLLPPVPGLHIPLVTWQRPDAPANHQNVAAFHPKMGPSFPSPKPGSERLSFVSAKQSTGQDTEAELQDATLALHGLTVEDEGYYTCEFVTFPKGSVRGMTWLRV

SEQ ID NO: 784 - protein, 127 aa, Artificial Sequence
  CD112 v23 IgV
QDVRVQVLPEVRGQLGGTVELPCHLLPPVPGPYISLVTWQRSDAPANHQNVAAFHPKMGPSFPSPKPGSERLSFVSAKQSTGQDTEAELQDATLALHGLAVEDEGNYTCEFVTFPKGSVRGMTWLRV

SEQ ID NO: 785 - protein, 127 aa, Artificial Sequence
  CD112 v24 IgV
QDVRVQVLPEVRGQLGGTVELPCHLLSPVPGLYISLVTWQRPDASANHQNVAAFHPKMGPSFPSPKPGSERLSFVSAKQSTGQDTEAELQDATLALHGLTVEDEGIYTCEFVTFPKGSVRGMTWLRV

SEQ ID NO: 786 - protein, 127 aa, Artificial Sequence
  CD112 v25 IgV
QDVRVQVLPEVRGQLGGTVELPCHLLPPVPGLHISLVTWQRPDAPAKHQNVAAFHPKMGPSFPSPKPGSERLSFVSAKQSTGQDTEAELQDATLALHGLTVEDEGNYTCEFVTFPKGSVRGMTWLRV

SEQ ID NO: 787 - protein, 127 aa, Artificial Sequence
  CD112 v26 IgV
QDVRVQVLPEVRGQLGGTVELPCHLLPPVPGLHISLVTWQRPDAPANHQNVAAFHPKMGPSFPSPKPGSERLSFVSAKQSTGQDTEAELQDATLALHGLTVEDEGYYTCEFVTFPKGSVRGMTWLRV

SEQ ID NO: 788 - protein, 127 aa, Artificial Sequence
  CD112 v27 IgV
QDVRVQVLPEVRGQLGGTVELPCHLLPPVPGLYISLVTWQRPDAPANHQNVAAFHPKMGPSFPSPKPGSERLSFVSARQSTGQGTEAELQDATLALHGLTVEDEGNYTCEFVTSPKGSVRGMTWLRV

SEQ ID NO: 789 - protein, 127 aa, Artificial Sequence
  CD112 v28 IgV
QDVRVQVLPEVRGQLGGTVELPCHLLPPVPGLHISLVTWQRPDAPAKHQNVAALHPKMGPSFPSPKPGSERLSFVSAKQSTGQDTEAELQDATLALHGLTVEDEGNYTCEFVTFPKGSVRGMTWLRV

SEQ ID NO: 790 - protein, 127 aa, Artificial Sequence
  CD112 v29 IgV
QDVRVQVLPEVRGQLGGTVELPCHLLPPVPGLHISLVTWQRPDAPANHQNVAAFHPKMGPSFPSPKPGSERLSFVSAKQSTGQDTEAELQDATLALHGLTVEDEGNYTCEFVTFPKGSVRGMTWLRV

SEQ ID NO: 791 - protein, 127 aa, Artificial Sequence
  CD112 v30 IgV
QDVRVQVLPEVRGQLGGTVELPCHLLPPVPGLYISLVTWQRPDAPANHQNVAAFHPKMGPSFPSPKPGSERLSFVSAKQSTGQDTEAELQDATLVLHGLTVEDEGNYTCEFVTFPKGSVRGMTWLRV

SEQ ID NO: 792 - protein, 127 aa, Artificial Sequence
  CD112 v31 IgV
QDVRVQVLPEVWGQLGGTVELPCHLLPPVPGLYISLVTWQRPDAPANHQNVAAFHPKMGPSFPSPKPGSERLSFVSAKQSTGQDTEAELQDATLALHGLTVEDEGNYTCEFVTFPKGSVRGMTWLRV

SEQ ID NO: 793 - protein, 127 aa, Artificial Sequence
  CD112 v32 IgV
QDVRVQVLPEVWGQLGGTVELPCHLLSPVPGLYISLVTWQRPDAPANHQNVAAFHPKMGPSFPSPKPGSERLSFVSAKQSTGQDTEAELQDATLALHGLTVEDEGNYTCEFVTFPKGSVRGMTWLRV

SEQ ID NO: 794 - protein, 127 aa, Artificial Sequence
  CD112 v33 IgV
QDVRVQVLPEVRGQLGGTVELPCHLLPPVPGLHISLVTWQRPDAPANHQNMAAFHPKMGPSFPSPKPGSERLSFVSAKQSTGQDTEAELQDATLALHGLTVEDEGNYTCEFVTFPKGSVRGMTWLRV

SEQ ID NO: 795 - protein, 127 aa, Artificial Sequence
  CD112 v34 IgV
QDVRVQVLPEVRGQLGGTVELPCHLLPPVPGLHISLVTWQRPDAPANHQNVAAFHPKMGPSFPSPKPGSERLSFVSAKQSTGQDTEAELQDATLALHGLTVEDEGNYTCEFVTFPKGTVRGMTWLRV

SEQ ID NO: 796 - protein, 127 aa, Artificial Sequence
  CD112 v35 IgV
QDVRVQVLPEVRGQLGGTVELPCHLLPPVPGLHISLVTWQRPDAPANHQNVAAFHPKMGPSFPSPKPGSERLSFVSAKQSTGQDTEAELQDATLALHGLTAEDEGNYTCEFVTFSKGSVRGMTWLRV

SEQ ID NO: 797 - protein, 127 aa, Artificial Sequence
  CD112 v36 IgV
QDVRVQVLPEVRGQLGGTVELPCRLLPPVPGLYISLVNWQRPGAPANHQNVAAFHPKMGPSFPSPKPGSERLSFVSAKQSTGQDTEAELQDATLALHGLTVEDEGNYTCEFVTFPKGSVRGMTWLRV

SEQ ID NO: 798 - protein, 127 aa, Artificial Sequence
  CD112 v37 gV
QDVRVQVLPEVRGQLGGTVELPCHLLPPVPGLYISLVTWQRPDAPANHQNVAAFHPKMGPSFPSPKPGSERLSFVSAKQSTGQDTEAELQDATLALHGLTVEDEGNYTCEFVTFPKGSVRGMTWLRV

SEQ ID NO: 799 - protein, 127 aa, Artificial Sequence
  CD112 v38 gV
QDVRVQVLPEVRGQLGGTVELPCHLLAPVPGLYISLVTWQRPDAPANHQNVAAFHPKMGPSFPSPKPGSERLSFVSAKQSTGQDTEAELQDATLALHGLTVEDEGNYTCEFVTFPKGSVRGMTWLRV

SEQ ID NO: 800 - protein, 127 aa, Artificial Sequence
  CD112 v39 gV
QDVRVQVLPEVRGQLGGTVELPCHLLPPVPGLYISLVTWQRPDAPANHQNVAAFHPKMGPSFPSPKPGSERLSFVSAKQSTGQDTEAELQDATLALHGLTVEDEGNYTCEFVTFPKGTVRGMTWLRV

SEQ ID NO: 801 - protein, 127 aa, Artificial Sequence
  CD112 v40 gV
QDVRVQVLPEVWGQLGGTVELPCHLLPPVPGLYISLVTWQRPDAPANHQNVAAFHPKMGPSFPSPKPGSERLSFVSAKQSTGQDTEAELQDATLALHGLTVEDEGNYTCEFVTFPKGSVRGITWLRV

SEQ ID NO: 802 - protein, 127 aa, Artificial Sequence
  CD112 v41 gV
QDVRVQVLPEVRGQLGGTVELPCHLLPPVPGLYISLVTWQRPDAPANHQNVAAFHPKMGPSFPSPKPGSERLSFVSAKQSTGKDTEAELQDATLALHGLTVEDEGYYTCEFVTFPKGSVRGMTWLRV

SEQ ID NO: 803 - protein, 127 aa, Artificial Sequence
  CD112 v42 gV
QDVRVQVLPEVWGQLGGTVELPCHLLSPVPGLYISLVTWQRPDAPANHQNVAAFHPKMGPSFPSPKPGSERLSFVSAKQSTGQDTEAELQDATLALHGLTVEDEGNYTCEFVTFPKGTVRGMTWLRV

SEQ ID NO: 804 - protein, 127 aa, Artificial Sequence
  CD112 v43 gV
QDVRVQVLPEVRGQLGGTVELPCHLLPSVPGLHISLVTWQRPDAPANHQNVAAFHPKMGPSFPSPKPGSERLSFVSAKQSTGQDTEAELQDATLALHGLTVEDEGNYTCEFVTFPKGSVRGMTWLRV

SEQ ID NO: 805 - protein, 127 aa, Artificial Sequence
  CD112 v44 gV
QDVRVQVLPEVRGQLGGTVELPCHLLSPVPGLYISLVTWQRPDAPANHQNVAAFHPKMGPSFPSPKPGSERLSFVSAKQSTGQDTEAELRDATLALHGLTVEDEGNYTCEFVTFPKGSVRGMTWLRV

SEQ ID NO: 806 - protein, 127 aa, Artificial Sequence
  CD112 v45 IgV
QDVRVQVLPEVRGQVGGTVELPCHLLAPVPGLYISLVTWQRPDAPANHQNVAAFHPKMGPSFPSPKPGSERLSFVSAKQSTGQDTEAELQDATLALHGLTVEDEGNYTCEFVTFPKGTVRGMTWLRV

SEQ ID NO: 807 - protein, 127 aa, Artificial Sequence
  CD112 v46 IgV
QDVRVQVLPEVRGQLGGTVELPCHLLPPVPGLHISLVTWQRPDAPANHQNVAAFHPKMGPSFPSPKPGSERLSFVSAKQSTGQDTEAELQDATLALHGLTVEDEGYYICEFVTFPKGSVRGMTWLRV

SEQ ID NO: 808 - protein, 127 aa, Artificial Sequence
  CD112 v47 IgV
QDVRVQVLPEVRGQLGGTVELPCHLLPPVPGLHISLVTWQRPDAPANHQNVAAFHLKMGPSFPSPKPGSERLSFMSAKQSTGQDTEAELQDATLALHGLTMEDEGNYTCEFVTFPKGSVRGMTWLRV

SEQ ID NO: 809 - protein, 329 aa, Artificial Sequence
  CD112 v48 ECD
QDVRVQVLPEVRGQLGGTVELPCHLLPPVPGLYISLVTWQRPDAPAKHQNVAAFHPKMGPSFPSPKPGSERLSFVSAKRSTGQDTEAELQDATLALHGLTVEDEGNYTCEFATFPKGFVRGMTWLRVIAKPKNQAEAQKVTFSQDPTTVALCISKEGRPPARISWLSSLDWEAKETQVSGTLAGTVTVTSRFTLVPSGRADGVTVTCKVEHESFEEPALIPVTLSVRYPPEVSISGYDDNWYLGRTDATLSCDVRSNPEPTGYDWSTTSGTFPTSAVAQGSQLVIHAVDSLFNTTFVCTVTNAVGMGRAEQVIFVRETPNTAGAGATGG

SEQ ID NO: 810 - protein, 329 aa, Artificial Sequence
  CD112 v49 ECD
QDVRVQVLPEVRGQLGGTVELPCHLLPPVPGLYISLVTWRRPDAPANHQNVAAFHPKMGTSFPSPKPGSERLSFVSAKQSTGQDTEAELQDATLALHGLTVEDEGNYTCEFVTFPKGTVRGMTWLRVIAKPKNQAEAQKVTFSQDPTTVALCISKEGRPPARISWLSSLDWEAKETQVSGTLAGTVTVTSRFTLVPSGRADGVTVTCKVEHESFEEPALIPVTLSVRYPPEVSISGYDDNWYLGRTDATLSCDVRSNPEPTGYDWSTTSGTFPTSAVAQGSQLVIHAVDSLFNTTFVCTVTNAVGMGRAEQVIFVRETPNTAGAGATGG

SEQ ID NO: 811 - protein, 329 aa, Artificial Sequence
  CD112 v50 ECD
QDVRVQVLPEVRGQLGGTVELPCHLLPPVPGLYISLVTWQRPDAPANHQNVAAFHPKMGPSFPSPKPGSERLSFVSAKQSTGQDTEAELQDATLALHGLTVEDEGNYTCEFATYPKGFVRGMTWLRVIAKPKNQAEAQKVTFSQDPTTVALCISKEGRPPARISWLSSLDWEAKETQVSGTLAGTVTVTSRFTLVPSGRADGVTVTCKVEHESFEEPALIPVTLSVRYPPEVSISGYDDNWYLGRTDATLSCDVRSNPEPTGYDWSTTSGTFPTSAVAQGSQLVIHAVDSLFNTTFVCTVTNAVGMGRAEQVIFVRETPNTAGAGATGG

SEQ ID NO: 812 - protein, 329 aa, Artificial Sequence
  CD112 v51 ECD
QDVRVQVLPEVRGQLGGTVELPCHLLPPVPGLHISLVTWQRPDAPANHQNVAAFHPKMGPSFPSPKPGSERLSFVSARQSTGQDTEAELQDATLALHGLTVEDEGNYTCEFATFPKGYVRGMTWLRVIAKPKNQAEAQKVTFSQDPTTVALCISKEGRPPARISWLSSLDWEAKETQVSGTLAGTVTVTSRFTLVPSGRADGVTVTCKVEHESFEEPALIPVTLSVRYPPEVSISGYDDNWYLGRTDATLSCDVRSNPEPTGYDWSTTSGTFPTSAVAQGSQLVIHAVDSLFNTTFVCTVTNAVGMGRAEQVIFVRETPNTAGAGATGG

SEQ ID NO: 813 - protein, 329 aa, Artificial Sequence
  CD112 v52 ECD
QDVRVQVLPEVWGQLGGTVELPCHLLPPVPGLYISLVTWQRPDAPTNHQNVAAFHPKMGPSFPSPMPGSERLSFVSAKRSTGQDTEAELQDATLALHGLTVEDEGIYTCEFAAFPKGFVRGMTWLRVIAKPKNQAEAQKVTFSQDPTTVALCISKEGRPPARISWLSSLDWEAKETQVSGTLAGTVTVTSRFTLVPSGRADGVTVTCKVEHESFEEPALIPVTLSVRYPPEVSISGYDDNWYLGRTDATLSCDVRSNPEPTGYDWSTTSGTFPTSAVAQGSQLVIHAVDSLFNTTFVCTVTNAVGMGRAEQVIFVRETPNTAGAGATGG

SEQ ID NO: 814 - protein, 329 aa, Artificial Sequence
  CD112 v53 ECD
QDVRVQVLPEVRGQLGGTVELPCHLLPPVPGLHISLVTWQRPDAPANHQNVAAFHPKMGPSFPSPKPGSERLSFVSAKQSTGQDTEAELQDATLALHGLTVEDEGNYTCEFVTFPKGFVRGMTWLRVIAKPKNQAEAQKVTFSQDPTTVALCISKEGRPPARISWLSSLDWEAKETQVSGTLAGTVTVTSRFTLVPSGRADGVTVTCKVEHESFEEPALIPVTLSVRYPPEVSISGYDDNWYLGRTDATLSCDVRSNPEPTGYDWSTTSGTFPTSAVAQGSQLVIHAVDSLFNTTFVCTVTNAVGMGRAEQVIFVRETPNTAGAGATGG

SEQ ID NO: 815 - protein, 329 aa, Artificial Sequence
  CD112 v54 ECD
QDVRVQVLPEVWGQLGGTVELPCHLLPPVPGLHISLVTWQRPDAPANHQNVAAFHPKMGPSFPSPKPGSERLSFVSAKQSTGQDTEAELQDATLALHGLTVEDEGIYTCEFATFPKGFVRGMTWLRVIAKPKNQAEAQKVTFSQDPTTVALCISKEGRPPARISWLSSLDWEAKETQVSGTLAGTVTVTSRFTLVPSGRADGVTVTCKVEHESFEEPALIPVTLSVRYPPEVSISGYDDNWYLGRTDATLSCDVRSNPEPTGYDWSTTSGTFPTSAVAQGSQLVIHAVDSLFNTTFVCTVTNAVGMGRAEQVIFVRETPNTAGAGATGG

SEQ ID NO: 816 - protein, 329 aa, Artificial Sequence
  CD112 v55 ECD
QDVRVQVLPEVRGQVGGTVELPCHLLPPVPGLYISLVTWQRPDAPANHQNVAAFHPKMGPSFPSPKPGSERLSFVSAKQSTGQDTEAELRDATLALHGLTVEDEGNYTCEFATFPKGFVRGMTWLRVIAKPKNQAEAQKVTFSQDPTTVALCISKEGRPPARISWLSSLDWEAKETQVSGTLAGTVTVTSRFTLVPSGRADGVTVTCKVEHESFEEPALIPVTLSVRYPPEVSISGYDDNWYLGRTDATLSCDVRSNPEPTGYDWSTTSGTFPTSAVAQGSQLVIHAVDSLFNTTFVCTVTNAVGMGRAEQVIFVRETPNTAGAGATGG

SEQ ID NO: 817 - protein, 329 aa, Artificial Sequence; identical to SEQ ID NO: 816
  CD112 v56 ECD

SEQ ID NO: 818 - protein, 329 aa, Artificial Sequence
  CD112 v57 ECD
QDVRVQVLPEVRGQLGGTVELPCHLLPPVPGPYISLVTWQRPDAPANHQNVAAFHPKMGPSFPSPKPGSERLSFVSAKQSTGQDTEAELQDATLALHGLTVEDEGNYTCEFATFPKGFVRGMTWLRVIAKPKNQAEAQKVTFSQDPTTVALCISKEGRPPARISWLSSLDWEAKETQVSGTLAGTVTVTSRFTLVPSGRADGVTVTCKVEHESFEEPALIPVTLSVRYPPEVSISGYDDNWYLGRTDATLSCDVRSNPEPTGYDWSTTSGTFPTSAVAQGSQLVIHAVDSLFNTTFVCTVTNAVGMGRAEQVIFVRETPNTAGAGATGG

SEQ ID NO: 819 - protein, 329 aa, Artificial Sequence
  CD112 v58 ECD
QDVRVQVLPEVRGQLGGTVELPCHLLPPVPGLHISLVTWQRPDAPANHQNVAAFHPKMGPSFPSPKPGSERLSFVSAKRSTGQDTEAELQDATLALHGLTVEDEGNYTCEFVTFPKGYVRGMTWLRVIAKPKNQAEAQKVTFSQDPTTVALCISKEGRPPARISWLSSLDWEAKETQVSGTLAGTVTVTSRFTLVPSGRADGVTVTCKVEHESFEEPALIPVTLSVRYPPEVSISGYDDNWYLGRTDATLSCDVRSNPEPTGYDWSTTSGTFPTSAVAQGSQLVIHAVDSLFNTTFVCTVTNAVGMGRAEQVIFVRETPNTAGAGATGG

SEQ ID NO: 820 - protein, 329 aa, Artificial Sequence
  CD112 v59 ECD
QDVRVQVLPEVRGQLGGAVELPCHLLPPVPGLYISLVTWQRPDAPANHQNVAAFHPKMGPSFPSPKPGSERLSFVSAKQSTGQDTEAELQDATLALHGLTVEDEGIYTCEFATFPKGTVRGMTWLRVIAKPKNQAEAQKVTFSQDPTTVALCISKEGRPPARISWLSSLDWEAKETQVSGTLAGTVTVTSRFTLVPSGRADGVTVTCKVEHESFEEPALIPVTLSVRYPPEVSISGYDDNWYLGRTDATLSCDVRSNPEPTGYDWSTTSGTFPTSAVAQGSQLVIHAVDSLFNTTFVCTVTNAVGMGRAEQVIFVRETPNTAGAGATGG

SEQ ID NO: 821 - protein, 329 aa, Artificial Sequence
  CD112 v60 ECD
QDVRVQVLPEVRGQVGGTVELPCHLLPPVPGLHISLVTWQRPDAPANHQNVAAFHPKMGPSFPSPKPGSERLSFVSAKQSTGQDTEAELQDATLALHGLTVEDEGYYTCEFVTFPKGFVRGMTWLRVIAKPKNQAEAQKVTFSQDPTTVALCISKEGRPPARISWLSSLDWEAKETQVSGTLAGTVTVTSRFTLVPSGRADGVTVTCKVEHESFEEPALIPVTLSVRYPPEVSISGYDDNWYLGRTDATLSCDVRSNPEPTGYDWSTTSGTFPTSAVAQGSQLVIHAVDSLFNTTFVCTVTNAVGMGRAEQVIFVRETPNTAGAGATGG

SEQ ID NO: 822 - protein, 329 aa, Artificial Sequence
  CD112 v61 ECD
QDVRVQVLPEVRGQLGGTVELPCHLLPPVPGLYISLMTWQRPDAPANHQNVAAFHPKMGPSFPSPKPGSERLSFVSAKQSTGQDTEAELQDATLALHGLTVEDEGNYTCEFATFPKGFVRGMTWLRVIAKPKNQAEAQKVTFSQDPTTVALCISKEGRPPARISWLSSLDWEAKETQVSGTLAGTVTVTSRFTLVPSGRADGVTVTCKVEHESFEEPALIPVTLSVRYPPEVSISGYDDNWYLGRTDATLSCDVRSNPEPTGYDWSTTSGTFPTSAVAQGSQLVIHAVDSLFNTTFVCTVTNAVGMGRAEQVIFVRETPNTAGAGATGG

SEQ ID NO: 823 - protein, 329 aa, Artificial Sequence
  CD112 v62 ECD
QDVRVQVLPEVRGQLGGTVELPCHLLPPVPGLYISLVTWQRPDAPAKHQNVAAFHPKMGPSFPSPKPGSERLSFVSAKQSTGQDTEAELQDATLALHGLTVEDEGNYTCEFVTFPKGYVRGMTWLRVIAKPKNQAEAQKVTFSQDPTTVALCISKEGRPPARISWLSSLDWEAKETQVSGTLAGTVTVTSRFTLVPSGRADGVTVTCKVEHESFEEPALIPVTLSVRYPPEVSISGYDDNWYLGRTDATLSCDVRSNPEPTGYDWSTTSGTFPTSAVAQGSQLVIHAVDSLFNTTFVCTVTNAVGMGRAEQVIFVRETPNTAGAGATGG

SEQ ID NO: 824 - protein, 329 aa, Artificial Sequence
  CD112 v63 ECD
QDVRVQVLPEVRGQLGGTVELPCHLLPPVPGLYISLVTWQRPDAPTNHQNVAAFHPKMGPSFPSPKPGSERLSFVSAKQSTGQDTEAELQDATLALHGLTVEDEGNYTCEFVTFPKGSVRGMTWLRVIAKPKNQAEAQKVTFSQDPTTVALCISKEGRPPARISWLSSLDWEAKETQVSGTLAGTVTVTSRFTLVPSGRADGVTVTCKVEHESFEEPALIPVTLSVRYPPEVSISGYDDNWYLGRTDATLSCDVRSNPEPTGYDWSTTSGTFPTSAVAQGSQLVIHAVDSLFNTTFVCTVTNAVGMGRAEQVIFVRETPNTAGAGATGG

SEQ ID NO: 825 - protein, 329 aa, Artificial Sequence
  CD112 v64 ECD
QDVRVQVLPEVRGQLGGTVELPCHLLPSVPGLHISLVTWQRPDAPANHQNVAAFHPKMGPSFPSPKPGSERLSFVSAKQSTGQDTEAELQDATLALHGLTVEDEGIYTCEFATFPKGYVRGMTWLRVIAKPKNQAEAQKVTFSQDPTTVALCISKEGRPPARISWLSSLDWEAKETQVSGTLAGTVTVTSRFTLVPSGRADGVTVTCKVEHESFEEPALIPVTLSVRYPPEVSISGYDDNWYLGRTDATLSCDVRSNPEPTGYDWSTTSGTFPTSAVAQGSQLVIHAVDSLFNTTFVCTVTNAVGMGRAEQVIFVRETPNTAGAGATGG

SEQ ID NO: 826 - protein, 329 aa, Artificial Sequence
  CD112 v65 ECD
QDVRVQVLPEVRGQLGGTVELPCHLLPPVSGLHISLVTWQRPDAPAKHQNVAAFHPKMGPSFPSPKPGSERLSFMSAKRSTGQDTEAELQDATLALHGLTVEDEGIYTCEFATFPKGYVRGMTWLRVIAKPKNQAEAQKVTFSQDPTTVALCISKEGRPPARISWLSSLDWEAKETQVSGTLAGTVTVTSRFTLVPSGRADGVTVTCKVEHESFEEPALIPVTLSVRYPPEVSISGYDDNWYLGRTDATLSCDVRSNPEPTGYDWSTTSGTFPTSAVAQGSQLVIHAVDSLFNTTFVCTVTNAVGMGRAEQVIFVRETPNTAGAGATGG

SEQ ID NO: 827 - protein, 329 aa, Artificial Sequence
  CD112 v66 ECD
QDVRVQVLPEVRGQLGGTAELPCHLLPPVPGLYISLVTWQRPDAPAKHQNVAAFHPKMGPSFPSPKPGSERLSFVSAKQSTGQDTEAELQDATLALHGLTVEDEGYYTCEFATFPEGYVRGMTWLRVIAKPKNQAEAQKVTFSQDPTTVALCISKEGRPPARISWLSSLDWEAKETQVSGTLAGTVTVTSRFTLVPSGRADGVTVTCKVEHESFEEPALIPVTLSVRYPPEVSISGYDDNWYLGRTDATLSCDVRSNPEPTGYDWSTTSGTFPTSAVAQGSQLVIHAVDSLFNTTFVCTVTNAVGMGRAEQVIFVRETPNTAGAGATGG

SEQ ID NO: 828 - protein, 329 aa, Artificial Sequence
  CD112 v67 ECD
QDVRVQVLPEVRGQLGGTVELPCHLLPPVPGLYISLVTWQRPDAPANHQNVAAFHPKMGPSFPSPKPGSERLSFVSAKRSTGQDAEAELQDATLALHGLTVEDEGNYTCEFVTFPKGYVRGMTWLRVIAKPKNQAEAQKVTFSQDPTTVALCISKEGRPPARISWLSSLDWEAKETQVSGTLAGTVTVTSRFTLVPSGRADGVTVTCKVEHESFEEPALIPVTLSVRYPPEVSISGYDDNWYLGRTDATLSCDVRSNPEPTGYDWSTTSGTFPTSAVAQGSQLVIHAVDSLFNTTFVCTVTNAVGMGRAEQVIFVRETPNTAGAGATGG

SEQ ID NO: 829 - protein, 329 aa, Artificial Sequence
  CD112 v68 ECD
QDVRVQVLPEVRGQLGGTVELPCHLLPPVPGLYISLVTWQRPDAPANHQNVAAFHPKMGPSFPSPKPGSERLSFVSAKQSTGQDTEAELQDATLALHGLTMEDEGIYTCEFATFPKGYVRGMTWLRVIAKPKNQAEAQKVTFSQDPTTVALCISKEGRPPARISWLSSLDWEAKETQVSGTLAGTVTVTSRFTLVPSGRADGVTVTCKVEHESFEEPALIPVTLSVRYPPEVSISGYDDNWYLGRTDATLSCDVRSNPEPTGYDWSTTSGTFPTSAVAQGSQLVIHAVDSLFNTTFVCTVTNAVGMGRAEQVIFVRETPNTAGAGATGG

SEQ ID NO: 830 - protein, 329 aa, Artificial Sequence
  CD112 v69 ECD
QDVRVQVLPEVRGQLGGTVELPCHLLPPVPGLHISLVTWQRPDAPANHQNVAAFHPKMGPSFPSPKPGSERLSFVSAKRSTGQDTEAELQDATLALHGLTVEDEGIYTCEFVTFPKGTVRGMTWLRVIAKPKNQAEAQKVTFSQDPTTVALCISKEGRPPARISWLSSLDWEAKETQVSGTLAGTVTVTSRFTLVPSGRADGVTVTCKVEHESFEEPALIPVTLSVRYPPEVSISGYDDNWYLGRTDATLSCDVRSNPEPTGYDWSTTSGTFPTSAVAQGSQLVIHAVDSLFNTTFVCTVTNAVGMGRAEQVIFVRETPNTAGAGATGG

SEQ ID NO: 831 - protein, 329 aa, Artificial Sequence
  CD112 v70 ECD
QDVRVQVLPEVRGQLGGTVELPCHLLPPVPGLYISLVTWQRPDAPANHQNVAAFHPKMGPSFPSPKPGSERLSFVSAKRSTGQDTEAELQDATLALHGLTVEDEGNYTCEFVTFPKGSVRGMTWLRVIAKPKNQAEAQKVTFSQDPTTVALCISKEGRPPARISWLSSLDWEAKETQVSGTLAGTVTVTSRFTLVPSGRADGVTVTCKVEHESFEEPALIPVTLSVRYPPEVSISGYDDNWYLGRTDATLSCDVRSNPEPTGYDWSTTSGTFPTSAVAQGSQLVIHAVDSLFNTTFVCTVTNAVGMGRAEQVIFVRETPNTAGAGATGG

SEQ ID NO: 832 - protein, 329 aa, Artificial Sequence
  CD112 v71 ECD
QDVRVQVLPEVRGQLGGTVELPCHLLPPVPGLHISLVTWQRPDAPTNHQNVAAFHPKMGPSFPSPKPGSERLSFVSAKRSTGQDTEAELQDATLALHGLTVEDEGIYTCEFATFPKGFVRGMTWLRVIAKPKNQAEAQKVTFSQDPTTVALCISKEGRPPARISWLSSLDWEAKETQVSGTLAGTVTVTSRFTLVPSGRADGVTVTCKVEHESFEEPALIPVTLSVRYPPEVSISGYDDNWYLGRTDATLSCDVRSNPEPTGYDWSTTSGTFPTSAVAQGSQLVIHAVDSLFNTTFVCTVTNAVGMGRAEQVIFVRETPNTAGAGATGG

SEQ ID NO: 833 - protein, 329 aa, Artificial Sequence
  CD112 v72 ECD
QDVRVQVLPEVRGQLGGTVELPCHLLPPVPGLYISLVTWQRPDAPANHQNVAAFHPKMGPSFPSPKPGSERLSFVSAKQSTGQDTEAELQDATLALHGLTVEDEGNYTCEFVTFPKGSVRSMTWLRVIAKPKNQAEAQKVTFSQDPTTVALCISKEGRPPARISWLSSLDWEAKETQVSGTLAGTVTVTSRFTLVPSGRADGVTVTCKVEHESFEEPALIPVTLSVRYPPEVSISGYDDNWYLGRTDATLSCDVRSNPEPTGYDWSTTSGTFPTSAVAQGSQLVIHAVDSLFNTTFVCTVTNAVGMGRAEQVIFVRETPNTAGAGATGG

SEQ ID NO: 834 - protein, 329 aa, Artificial Sequence
  CD112 v73 ECD
QDVRVQVLPEVRGQLGGTVELPCHLLPPVPGLHISLVTWQRPDAPANHQNVAAFHPKMGPSFPSPKPGSERLSFVSAKRSTGQDTEAELQDATLALHGLTVEDEGIYTCEFATFPKGYVRGMTWLRVIAKPKNQAEAQKVTFSQDPTTVALCISKEGRPPARISWLSSLDWEAKETQVSGTLAGTVTVTSRFTLVPSGRADGVTVTCKVEHESFEEPALIPVTLSVRYPPEVSISGYDDNWYLGRTDATLSCDVRSNPEPTGYDWSTTSGTFPTSAVAQGSQLVIHAVDSLFNTTFVCTVTNAVGMGRAEQVIFVRETPNTAGAGATGG

SEQ ID NO: 835 - protein, 329 aa, Artificial Sequence
  CD112 v74 ECD
QDVRVQVLPEVRGQLGGTVELPCHLLPPVPGLHISLVTWQRPDAPANHQNVAAFHPKMGPSFPSPKPGSERLSFVSAKQSTGQDTEAELQDATLALHGLTVEDEGIYTCEFVTFPKGSVRGMTWLRVIAKPKNQAEAQKVTFSQDPTTVALCISKEGRPPARISWLSSLDWEAKETQVSGTLAGTVTVTSRFTLVPSGRADGVTVTCKVEHESFEEPALIPVTLSVRYPPEVSISGYDDNWYLGRTDATLSCDVRSNPEPTGYDWSTTSGTFPTSAVAQGSQLVIHAVDSLFNTTFVCTVTNAVGMGRAEQVIFVRETPNTAGAGATGG

SEQ ID NO: 836 - protein, 329 aa, Artificial Sequence
  CD112 v75 ECD
QDVRVQVLPEVRGQLGGTVELPCHLLPPVPGLHISLVTWQRPDAPTNHQNVAAFHPKMGPSFPSPKPGSERLSFVSAKQSTGQDTEAELQDATLALHGLTMEDEGNYTCEFVTFPKGTVRGMTWLRVIAKPKNQAEAQKVTFSQDPTTVALCISKEGRPPARISWLSSLDWEAKETQVSGTLAGTVTVTSRFTLVPSGRADGVTVTCKVEHESFEEPALIPVTLSVRYPPEVSISGYDDNWYLGRTDATLSCDVRSNPEPTGYDWSTTSGTFPTSAVAQGSQLVIHAVDSLFNTTFVCTVTNAVGMGRAEQVIFVRETPNTAGAGATGG

SEQ ID NO: 837 - protein, 329 aa, Artificial Sequence
  CD112 v76 ECD
QDVRVQVLPEVRGQLGGTVELPCHLLPPVPGPYISLVTWQRPDAPANHQNVAAFHPKMGPSFPSPKPGSERLSFVSAKQSTGQDTEAELQDATLALHGMTVEDEGIYTCEFATFPKGFVRGMTWLRVIAKPKNQAEAQKVTFSQDPTTVALCISKEGRPPARISWLSSLDWEAKETQVSGTLAGTVTVTSRFTLVPSGRADGVTVTCKVEHESFEEPALIPVTLSVRYPPEVSISGYDDNWYLGRTDATLSCDVRSNPEPTGYDWSTTSGTFPTSAVAQGSQLVIHAVDSLFNTTFVCTVTNAVGMGRAEQVIFVRETPNTAGAGATGG

SEQ ID NO: 838 - protein, 329 aa, Artificial Sequence
  CD112 v77 ECD
QDVRVQVLPEVRGQLGGTVELPCHLLPPVPGPYISLVTWQRPDAPANHQNVAAFHPKMGPSFPSPKPGSERLSFVSAKQSTGQDTEAELQDATLALHGLTVEDEGNYACEFATFPKGFVRGMTWLRVIAKPKNQAEAQKVTFSQDPTTVALCISKEGRPPARISWLSSLDWEAKETQVSGTLAGTVTVTSRFTLVPSGRADGVTVTCKVEHESFEEPALIPVTLSVRYPPEVSISGYDDNWYLGRTDATLSCDVRSNPEPTGYDWSTTSGTFPTSAVAQGSQLVIHAVDSLFNTTFVCTVTNAVGMGRAEQVIFVRETPNTAGAGATGG

SEQ ID NO: 839 - protein, 329 aa, Artificial Sequence
  CD112 v78 ECD
QDVRVQVLPEVWGQLGGTVELPCHLLPPVPGLYISLVTWQRPDAPANHQNVAAFHPKMGPSFPSPKPGSERLSFVSAKRSTGQDTEAELQDATLALHGLTVEDEGNYTCEFVTFPKGSVRGMTWLRVIAKPKNQAEAQKVTFSQDPTTVALCISKEGRPPARISWLSSLDWEAKETQVSGTLAGTVTVTSRFTLVPSGRADGVTVTCKVEHESFEEPALIPVTLSVRYPPEVSISGYDDNWYLGRTDATLSCDVRSNPEPTGYDWSTTSGTFPTSAVAQGSQLVIHAVDSLFNTTFVCTVTNAVGMGRAEQVIFVRETPNTAGAGATGG

SEQ ID NO: 840 - protein, 329 aa, Artificial Sequence
  CD112 v79 ECD
QDVRVQVLPEVRGQLGGTVELPCHLLPPVPGLHISLVTWQRPDAPANHQNVAAFHPKMGPSFPSPKPGSERLSFVSAKQSTGQDTEAELQDATLALHGLTVEDEGYYTCGFVTFPKGSVRGMTWLRVIAKPKNQAEAQKVTFSQDPTTVALCISKEGRPPARISWLSSLDWEAKETQVSGTLAGTVTVTSRFTLVPSGRADGVTVTCKVEHESFEEPALIPVTLSVRYPPEVSISGYDDNWYLGRTDATLSCDVRSNPEPTGYDWSTTSGTFPTSAVAQGSQLVIHAVDSLFNTTFVCTVTNAVGMGRAEQVIFVRETPNTAGAGATGG

SEQ ID NO: 841 - protein, 329 aa, Artificial Sequence
  CD112 v80 ECD
QDVRVQVLPEVRGQLGGTVELPCHLLPPVPGLHISLVTWQRPDAPANHQNVAAFHPKMGPSFPSPKPGSERLSFVSAKQSTGQDTEAELQDATLALHGLTVEDEGIYTCEFATFPKGYVRGMTWLRVIAKPKNQAEAQKVTFSQDPTTVALCISKEGRPPARISWLSSLDWEAKETQVSGTLAGTVTVTSRFTLVPSGRADGVTVTCKVEHESFEEPALIPVTLSVRYPPEVSISGYDDNWYLGRTDATLSCDVRSNPEPTGYDWSTTSGTFPTSAVAQGSQLVIHAVDSLFNTTFVCTVTNAVGMGRAEQVIFVRETPNTAGAGATGG

SEQ ID NO: 842 - protein, 329 aa, Artificial Sequence
  CD112 v81 ECD
QDVRVQVLPEVRGQLGGTVELPCHLLPPVPGLYISLVTWQRPDAPANHQNVAAFHPKMGPSFPSPKPGSERLSFVSAKRSTGQDTEAELQDATLALHGLTVEDEGNYTCEFATFPKGFVRGMTWLRVIAKPKNQAEAQKVTFSQDPTTVALCISKEGRPPARISWLSSLDWEAKETQVSGTLAGTVTVTSRFTLVPSGRADGVTVTCKVEHESFEEPALIPVTLSVRYPPEVSISGYDDNWYLGRTDATLSCDVRSNPEPTGYDWSTTSGTFPTSAVAQGSQLVIHAVDSLFNTTFVCTVTNAVGMGRAEQVIFVRETPNTAGAGATGG

SEQ ID NO: 843 - protein, 329 aa, Artificial Sequence
  CD112 v82 ECD
QDVRVQVLPEVRGQLGGTVELPCHLLPPVPGLHISLVTWQRPDAPANHQNVAAFHPKMGPSFPSPKPGSERLSFVSAKRSTGQDTEAELQDATLALHDLTMEDEGNYTCEFVTFPKGSVRGMTWLRVIAKPKNQAEAQKVTFSQDPTTVALCISKEGRPPARISWLSSLDWEAKETQVSGTLAGTVTVTSRFTLVPSGRADGVTVTCKVEHESFEEPALIPVTLSVRYPPEVSISGYDDNWYLGRTDATLSCDVRSNPEPTGYDWSTTSGTFPTSAVAQGSQLVIHAVDSLFNTTFVCTVTNAVGMGRAEQVIFVRETPNTAGAGATGG

SEQ ID NO: 844 - protein, 329 aa, Artificial Sequence
  CD112 v83 ECD
QDVRVQVLPEVRGQLGGTVELPCHLLPPVPGLYISLVTWQRPDAPAKHQNVAAFHPKMGPSFPSPKPGSERLSFVSAKQSSGQDTEAELQDATLALHGLTMEDEGNYTCEFVTFPKGFVRGMTWLRVIAKPKNQAEAQKVTFSQDPTTVALCISKEGRPPARISWLSSLDWEAKETQVSGTLAGTVTVTSRFTLVPSGRADGVTVTCKVEHESFEEPALIPVTLSVRYPPEVSISGYDDNWYLGRTDATLSCDVRSNPEPTGYDWSTTSGTFPTSAVAQGSQLVIHAVDSLFNTTFVCTVTNAVGMGRAEQVIFVRETPNTAGAGATGG

SEQ ID NO: 845 - protein, 329 aa, Artificial Sequence
  CD112 v84 ECD
QDVRVQVLPEVRGQLGGTVELPCHLLPPVPGLYISLVTWQRPDAPANHQNVAAFHPKMGPSFPSPKPGSERLSFVSAKQSTSQDTEAELQDATLALHGLTVEDEGNYTCEFATFPKGYVRGMTWLRVIAKPKNQAEAQKVTFSQDPTTVALCISKEGRPPARISWLSSLDWEAKETQVSGTLAGTVTVTSRFTLVPSGRADGVTVTCKVEHESFEEPALIPVTLSVRYPPEVSISGYDDNWYLGRTDATLSCDVRSNPEPTGYDWSTTSGTFPTSAVAQGSQLVIHAVDSLFNTTFVCTVTNAVGMGRAEQVIFVRETPNTAGAGATGG

SEQ ID NO: 846 - protein, 329 aa, Artificial Sequence
  CD112 v85 ECD
QDVRVQVLPEVRGQLGGTVELPCHLLPPVPGLHISLVTWQRPDAPANHQNVAAFHPKMGPSFPSPKPGSERLSFVSAKQSTGQDTEAELQDATLALHGLTVEDEGNYTCEFVTFPKGYVRGMTWLRVIAKPKNQAEAQKVTFSQDPTTVALCISKEGRPPARISWLSSLDWEAKETQVSGTLAGTVTVTSRFTLVPSGRADGVTVTCKVEHESFEEPALIPVTLSVRYPPEVSISGYDDNWYLGRTDATLSCDVRSNPEPTGYDWSTTSGTFPTSAVAQGSQLVIHAVDSLFNTTFVCTVTNAVGMGRAEQVIFVRETPNTAGAGATGG

SEQ ID NO: 847 - protein, 329 aa, Artificial Sequence
  CD112 v86 ECD
QDVRVQVLPEVRGQLGGTVELPCHLLPPVPGLHISLVTWQRPDAPAKHQNVAAFHPKMGPSFPSPKPGSERLSFVSAKRSTGQDTEAELQDATLALHGLTVEDEGYYTCEFVTFPKGSVRGMTWLRVIAKPKNQAEAQKVTFSQDPTTVALCISKEGRPPARISWLSSLDWEAKETQVSGTLAGTVTVTSRFTLVPSGRADGVTVTCKVEHESFEEPALIPVTLSVRYPPEVSISGYDDNWYLGRTDATLSCDVRSNPEPTGYDWSTTSGTFPTSAVAQGSQLVIHAVDSLFNTTFVCTVTNAVGMGRAEQVIFVRETPNTAGAGATGG

SEQ ID NO: 848 - protein, 329 aa, Artificial Sequence
  CD112 v87 ECD
QDVRVQVLPEVRGQLGGTVELPCHLLPPVPGLHISLVTWQRPDAPANHQNVAAFHPKMGPSFPSPKPGSERLSFVSAKQSTGQDTEAELQDATLALHGLTVEDEGNYTCEFATFPKGTVRGMTWLRVIAKPKNQAEAQKVTFSQDPTTVALCISKEGRPPARISWLSSLDWEAKETQVSGTLAGTVTVTSRFTLVPSGRADGVTVTCKVEHESFEEPALIPVTLSVRYPPEVSISGYDDNWYLGRTDATLSCDVRSNPEPTGYDWSTTSGTFPTSAVAQGSQLVIHAVDSLFNTTFVCTVTNAVGMGRAEQVIFVRETPNTAGAGATGG

SEQ ID NO: 849 - protein, 329 aa, Artificial Sequence
  CD112 v88 ECD
QDVRVQVLPEVWGQLGGTVELPCHLLPPVPGLHISLVTWQRPDAPANHQNVAAFHPKMGPSFPSPKPGSERLSFVSAKRSTGQDTEAELQDATLALHGLTMEDEGNYTCEFVTFPKGSVRGMTWLRVIAKPKNQAEAQKVTFSQDPTTVALCISKEGRPPARISWLSSLDWEAKETQVSGTLAGTVTVTSRFTLVPSGRADGVTVTCKVEHESFEEPALIPVTLSVRYPPEVSISGYDDNWYLGRTDATLSCDVRSNPEPTGYDWSTTSGTFPTSAVAQGSQLVIHAVDSLFNTTFVCTVTNAVGMGRAEQVIFVRETPNTAGAGATGG

SEQ ID NO: 850 - protein, 125 aa, Artificial Sequence
  CD112 v48 IgV
QDVRVQVLPEVRGQLGGTVELPCHLLPPVPGLYISLVTWQRPDAPAKHQNVAAFHPKMGPSFPSPKPGSERLSFVSAKRSTGQDTEAELQDATLALHGLTVEDEGNYTCEFATFPKGFVRGMTWL

SEQ ID NO: 851 - protein, 125 aa, Artificial Sequence
  CD112 v49 IgV
QDVRVQVLPEVRGQLGGTVELPCHLLPPVPGLYISLVTWRRPDAPANHQNVAAFHPKMGTSFPSPKPGSERLSFVSAKQSTGQDTEAELQDATLALHGLTVEDEGNYTCEFVTFPKGTVRGMTWL

SEQ ID NO: 852 - protein, 125 aa, Artificial Sequence
  CD112 v50 IgV
QDVRVQVLPEVRGQLGGTVELPCHLLPPVPGLYISLVTWQRPDAPANHQNVAAFHPKMGPSFPSPKPGSERLSFVSAKQSTGQDTEAELQDATLALHGLTVEDEGNYTCEFATYPKGFVRGMTWL

SEQ ID NO: 853 - protein, 125 aa, Artificial Sequence
  CD112 v51 IgV
QDVRVQVLPEVRGQLGGTVELPCHLLPPVPGLHISLVTWQRPDAPANHQNVAAFHPKMGPSFPSPKPGSERLSFVSARQSTGQDTEAELQDATLALHGLTVEDEGNYTCEFATFPKGYVRGMTWL

SEQ ID NO: 854 - protein, 125 aa, Artificial Sequence
  CD112 v52 IgV
QDVRVQVLPEVWGQLGGTVELPCHLLPPVPGLYISLVTWQRPDAPTNHQNVAAFHPKMGPSFPSPMPGSERLSFVSAKRSTGQDTEAELQDATLALHGLTVEDEGIYTCEFAAFPKGFVRGMTWL

SEQ ID NO: 855 - protein, 125 aa, Artificial Sequence
  CD112 v53 IgV
QDVRVQVLPEVRGQLGGTVELPCHLLPPVPGLHISLVTWQRPDAPANHQNVAAFHPKMGPSFPSPKPGSERLSFVSAKQSTGQDTEAELQDATLALHGLTVEDEGNYTCEFVTFPKGFVRGMTWL

SEQ ID NO: 856 - protein, 125 aa, Artificial Sequence
  CD112 v54 IgV
QDVRVQVLPEVWGQLGGTVELPCHLLPPVPGLHISLVTWQRPDAPANHQNVAAFHPKMGPSFPSPKPGSERLSFVSAKQSTGQDTEAELQDATLALHGLTVEDEGIYTCEFATFPKGFVRGMTWL

SEQ ID NO: 857 - protein, 125 aa, Artificial Sequence
  CD112 v55 IgV
QDVRVQVLPEVRGQVGGTVELPCHLLPPVPGLYISLVTWQRPDAPANHQNVAAFHPKMGPSFPSPKPGSERLSFVSAKQSTGQDTEAELRDATLALHGLTVEDEGNYTCEFATFPKGFVRGMTWL

SEQ ID NO: 858 - protein, 125 aa, Artificial Sequence
  CD112 v56 IgV
QDVRVQVLPEVRGQLGGTVELPCHLLPPVPGLYISLVTWQRPDAPAKHQNVAAFHPKMGPSFPSPKPGSERLSFVSAKQSTGQGTEAELQDATLALHGLTVEDEGIYTCEFATFPKGYVRGMTWL

SEQ ID NO: 859 - protein, 125 aa, Artificial Sequence
  CD112 v57 IgV
QDVRVQVLPEVRGQLGGTVELPCHLLPPVPGPYISLVTWQRPDAPANHQNVAAFHPKMGPSFPSPKPGSERLSFVSAKQSTGQDTEAELQDATLALHGLTVEDEGNYTCEFATFPKGFVRGMTWL

SEQ ID NO: 860 - protein, 125 aa, Artificial Sequence
  CD112 v58 IgV
QDVRVQVLPEVRGQLGGTVELPCHLLPPVPGLHISLVTWQRPDAPANHQNVAAFHPKMGPSFPSPKPGSERLSFVSAKRSTGQDTEAELQDATLALHGLTVEDEGNYTCEFVTFPKGYVRGMTWL

SEQ ID NO: 861 - protein, 125 aa, Artificial Sequence
  CD112 v59 IgV
QDVRVQVLPEVRGQLGGAVELPCHLLPPVPGLYISLVTWQRPDAPANHQNVAAFHPKMGPSFPSPKPGSERLSFVSAKQSTGQDTEAELQDATLALHGLTVEDEGIYTCEFATFPKGTVRGMTWL

SEQ ID NO: 862 - protein, 125 aa, Artificial Sequence
  CD112 v60 IgV
QDVRVQVLPEVRGQVGGTVELPCHLLPPVPGLHISLVTWQRPDAPANHQNVAAFHPKMGPSFPSPKPGSERLSFVSAKQSTGQDTEAELQDATLALHGLTVEDEGYYTCEFVTFPKGFVRGMTWL

SEQ ID NO: 863 - protein, 125 aa, Artificial Sequence
  CD112 v61 IgV
QDVRVQVLPEVRGQLGGTVELPCHLLPPVPGLYISLMTWQRPDAPANHQNVAAFHPKMGPSFPSPKPGSERLSFVSAKQSTGQDTEAELQDATLALHGLTVEDEGNYTCEFATFPKGFVRGMTWL

SEQ ID NO: 864 - protein, 125 aa, Artificial Sequence
  CD112 v62 IgV
QDVRVQVLPEVRGQLGGTVELPCHLLPPVPGLYISLVTWQRPDAPAKHQNVAAFHPKMGPSFPSPKPGSERLSFVSAKQSTGQDTEAELQDATLALHGLTVEDEGNYTCEFVTFPKGYVRGMTWL

SEQ ID NO: 865 - protein, 125 aa, Artificial Sequence
  CD112 v63 IgV
QDVRVQVLPEVRGQLGGTVELPCHLLPPVPGLYISLVTWQRPDAPTNHQNVAAFHPKMGPSFPSPKPGSERLSFVSAKQSTGQDTEAELQDATLALHGLTVEDEGNYTCEFVTFPKGSVRGMTWL

SEQ ID NO: 866 - protein, 125 aa, Artificial Sequence
  CD112 v64 IgV
QDVRVQVLPEVRGQLGGTVELPCHLLPSVPGLHISLVTWQRPDAPANHQNVAAFHPKMGPSFPSPKPGSERLSFVSAKQSTGQDTEAELQDATLALHGLTVEDEGIYTCEFATFPKGYVRGMTWL

SEQ ID NO: 867 - protein, 125 aa, Artificial Sequence
  CD112 v65 IgV
QDVRVQVLPEVRGQLGGTVELPCHLLPPVSGLHISLVTWQRPDAPAKHQNVAAFHPKMGPSFPSPKPGSERLSFMSAKRSTGQDTEAELQDATLALHGLTVEDEGIYTCEFATFPKGYVRGMTWL

SEQ ID NO: 868 - protein, 125 aa, Artificial Sequence
  CD112 v66 IgV
QDVRVQVLPEVRGQLGGTAELPCHLLPPVPGLYISLVTWQRPDAPAKHQNVAAFHPKMGPSFPSPKPGSERLSFVSAKQSTGQDTEAELQDATLALHGLTVEDEGYYTCEFATFPEGYVRGMTWL

SEQ ID NO: 869 - protein, 125 aa, Artificial Sequence
  CD112 v67 IgV
QDVRVQVLPEVRGQLGGTVELPCHLLPPVPGLYISLVTWQRPDAPANHQNVAAFHPKMGPSFPSPKPGSERLSFVSAKRSTGQDAEAELQDATLALHGLTVEDEGNYTCEFVTFPKGYVRGMTWL

SEQ ID NO: 870 - protein, 125 aa, Artificial Sequence
  CD112 v68 IgV
QDVRVQVLPEVRGQLGGTVELPCHLLPPVPGLYISLVTWQRPDAPANHQNVAAFHPKMGPSFPSPKPGSERLSFVSAKQSTGQDTEAELQDATLALHGLTMEDEGIYTCEFATFPKGYVRGMTWL

SEQ ID NO: 871 - protein, 125 aa, Artificial Sequence
  CD112 v69 IgV
QDVRVQVLPEVRGQLGGTVELPCHLLPPVPGLHISLVTWQRPDAPANHQNVAAFHPKMGPSFPSPKPGSERLSFVSAKRSTGQDTEAELQDATLALHGLTVEDEGIYTCEFVTFPKGTVRGMTWL

SEQ ID NO: 872 - protein, 125 aa, Artificial Sequence
  CD112 v70 IgV
QDVRVQVLPEVRGQLGGTVELPCHLLPPVPGLYISLVTWQRPDAPANHQNVAAFHPKMGPSFPSPKPGSERLSFVSAKRSTGQDTEAELQDATLALHGLTVEDEGNYTCEFVTFPKGSVRGMTWL

SEQ ID NO: 873 - protein, 125 aa, Artificial Sequence
  CD112 v71 IgV
QDVRVQVLPEVRGQLGGTVELPCHLLPPVPGLHISLVTWQRPDAPTNHQNVAAFHPKMGPSFPSPKPGSERLSFVSAKRSTGQDTEAELQDATLALHGLTVEDEGIYTCEFATFPKGFVRGMTWL

SEQ ID NO: 874 - protein, 125 aa, Artificial Sequence
  CD112 v72 IgV
QDVRVQVLPEVRGQLGGTVELPCHLLPPVPGLYISLVTWQRPDAPANHQNVAAFHPKMGPSFPSPKPGSERLSFVSAKQSTGQDTEAELQDATLALHGLTVEDEGNYTCEFVTFPKGSVRSMTWL

SEQ ID NO: 875 - protein, 125 aa, Artificial Sequence
  CD112 v73 IgV
QDVRVQVLPEVRGQLGGTVELPCHLLPPVPGLHISLVTWQRPDAPANHQNVAAFHPKMGPSFPSPKPGSERLSFVSAKRSTGQDTEAELQDATLALHGLTVEDEGIYTCEFATFPKGYVRGMTWL

SEQ ID NO: 876 - protein, 125 aa, Artificial Sequence
  CD112 v74 IgV
QDVRVQVLPEVRGQLGGTVELPCHLLPPVPGLHISLVTWQRPDAPANHQNVAAFHPKMGPSFPSPKPGSERLSFVSAKQSTGQDTEAELQDATLALHGLTVEDEGIYTCEFVTFPKGSVRGMTWL

SEQ ID NO: 877 - protein, 125 aa, Artificial Sequence
  CD112 v75 IgV
QDVRVQVLPEVRGQLGGTVELPCHLLPPVPGLHISLVTWQRPDAPTNHQNVAAFHPKMGPSFPSPKPGSERLSFVSAKQSTGQDTEAELQDATLALHGLTMEDEGNYTCEFVTFPKGTVRGMTWL

SEQ ID NO: 878 - protein, 125 aa, Artificial Sequence
  CD112 v76 IgV
QDVRVQVLPEVRGQLGGTVELPCHLLPPVPGPYISLVTWQRPDAPANHQNVAAFHPKMGPSFPSPKPGSERLSFVSAKQSTGQDTEAELQDATLALHGMTVEDEGIYTCEFATFPKGFVRGMTWL

SEQ ID NO: 879 - protein, 125 aa, Artificial Sequence
  CD112 v77 IgV
QDVRVQVLPEVRGQLGGTVELPCHLLPPVPGPYISLVTWQRPDAPANHQNVAAFHPKMGPSFPSPKPGSERLSFVSAKQSTGQDTEAELQDATLALHGLTVEDEGNYACEFATFPKGFVRGMTWL

SEQ ID NO: 880 - protein, 125 aa, Artificial Sequence
  CD112 v78 IgV
QDVRVQVLPEVWGQLGGTVELPCHLLPPVPGLYISLVTWQRPDAPANHQNVAAFHPKMGPSFPSPKPGSERLSFVSAKRSTGQDTEAELQDATLALHGLTVEDEGNYTCEFVTFPKGSVRGMTWL

SEQ ID NO: 881 - protein, 125 aa, Artificial Sequence
  CD112 v79 IgV
QDVRVQVLPEVRGQLGGTVELPCHLLPPVPGLHISLVTWQRPDAPANHQNVAAFHPKMGPSFPSPKPGSERLSFVSAKQSTGQDTEAELQDATLALHGLTVEDEGYYTCGFVTFPKGSVRGMTWL

SEQ ID NO: 882 - protein, 125 aa, Artificial Sequence
  CD112 v80 IgV
QDVRVQVLPEVRGQLGGTVELPCHLLPPVPGLHISLVTWQRPDAPANHQNVAAFHPKMGPSFPSPKPGSERLSFVSAKQSTGQDTEAELQDATLALHGLTVEDEGIYTCEFATFPKGYVRGMTWL

SEQ ID NO: 883 - protein, 125 aa, Artificial Sequence
  CD112 v81 IgV
QDVRVQVLPEVRGQLGGTVELPCHLLPPVPGLYISLVTWQRPDAPANHQNVAAFHPKMGPSFPSPKPGSERLSFVSAKRSTGQDTEAELQDATLALHGLTVEDEGNYTCEFATFPKGFVRGMTWL

SEQ ID NO: 884 - protein, 125 aa, Artificial Sequence
  CD112 v82 IgV
QDVRVQVLPEVRGQLGGTVELPCHLLPPVPGLHISLVTWQRPDAPANHQNVAAFHPKMGPSFPSPKPGSERLSFVSAKRSTGQDTEAELQDATLALHDLTMEDEGNYTCEFVTFPKGSVRGMTWL

SEQ ID NO: 885 - protein, 125 aa, Artificial Sequence
  CD112 v83 IgV
QDVRVQVLPEVRGQLGGTVELPCHLLPPVPGLYISLVTWQRPDAPAKHQNVAAFHPKMGPSFPSPKPGSERLSFVSAKQSSGQDTEAELQDATLALHGLTMEDEGNYTCEFVTFPKGFVRGMTWL

SEQ ID NO: 886 - protein, 125 aa, Artificial Sequence
  CD112 v84 IgV
QDVRVQVLPEVRGQLGGTVELPCHLLPPVPGLYISLVTWQRPDAPANHQNVAAFHPKMGPSFPSPKPGSERLSFVSAKQSTSQDTEAELQDATLALHGLTVEDEGNYTCEFATFPKGYVRGMTWL

SEQ ID NO: 887 - protein, 125 aa, Artificial Sequence
  CD112 v85 IgV
QDVRVQVLPEVRGQLGGTVELPCHLLPPVPGLHISLVTWQRPDAPANHQNVAAFHPKMGPSFPSPKPGSERLSFVSAKQSTGQDTEAELQDATLALHGLTVEDEGNYTCEFVTFPKGYVRGMTWL

SEQ ID NO: 888 - protein, 125 aa, Artificial Sequence
  CD112 v86 IgV
QDVRVQVLPEVRGQLGGTVELPCHLLPPVPGLHISLVTWQRPDAPAKHQNVAAFHPKMGPSFPSPKPGSERLSFVSAKRSTGQDTEAELQDATLALHGLTVEDEGYYTCEFVTFPKGSVRGMTWL

SEQ ID NO: 889 - protein, 125 aa, Artificial Sequence
  CD112 v87 IgV
QDVRVQVLPEVRGQLGGTVELPCHLLPPVPGLHISLVTWQRPDAPANHQNVAAFHPKMGPSFPSPKPGSERLSFVSAKQSTGQDTEAELQDATLALHGLTVEDEGNYTCEFATFPKGTVRGMTWL

SEQ ID NO: 890 - protein, 125 aa, Artificial Sequence
  CD112 v88 IgV
QDVRVQVLPEVWGQLGGTVELPCHLLPPVPGLHISLVTWQRPDAPANHQNVAAFHPKMGPSFPSPKPGSERLSFVSAKRSTGQDTEAELQDATLALHGLTMEDEGNYTCEFVTFPKGSVRGMTWL

SEQ ID NO: 891 - protein, 127 aa, Artificial Sequence
  CD112 v48 IgV
QDVRVQVLPEVRGQLGGTVELPCHLLPPVPGLYISLVTWQRPDAPAKHQNVAAFHPKMGPSFPSPKPGSERLSFVSAKRSTGQDTEAELQDATLALHGLTVEDEGNYTCEFATFPKGFVRGMTWLRV

SEQ ID NO: 892 - protein, 127 aa, Artificial Sequence
  CD112 v49 IgV
QDVRVQVLPEVRGQLGGTVELPCHLLPPVPGLYISLVTWRRPDAPANHQNVAAFHPKMGTSFPSPKPGSERLSFVSAKQSTGQDTEAELQDATLALHGLTVEDEGNYTCEFVTFPKGTVRGMTWLRV

SEQ ID NO: 893 - protein, 127 aa, Artificial Sequence
  CD112 v50 IgV
QDVRVQVLPEVRGQLGGTVELPCHLLPPVPGLYISLVTWQRPDAPANHQNVAAFHPKMGPSFPSPKPGSERLSFVSAKQSTGQDTEAELQDATLALHGLTVEDEGNYTCEFATYPKGFVRGMTWLRV

SEQ ID NO: 894 - protein, 127 aa, Artificial Sequence
  CD112 v51 IgV
QDVRVQVLPEVRGQLGGTVELPCHLLPPVPGLHISLVTWQRPDAPANHQNVAAFHPKMGPSFPSPKPGSERLSFVSARQSTGQDTEAELQDATLALHGLTVEDEGNYTCEFATFPKGYVRGMTWLRV

SEQ ID NO: 895 - protein, 127 aa, Artificial Sequence
  CD112 v52 IgV
QDVRVQVLPEVWGQLGGTVELPCHLLPPVPGLYISLVTWQRPDAPTNHQNVAAFHPKMGPSFPSPMPGSERLSFVSAKRSTGQDTEAELQDATLALHGLTVEDEGIYTCEFAAFPKGFVRGMTWLRV

SEQ ID NO: 896 - protein, 127 aa, Artificial Sequence
  CD112 v53 IgV
QDVRVQVLPEVRGQLGGTVELPCHLLPPVPGLHISLVTWQRPDAPANHQNVAAFHPKMGPSFPSPKPGSERLSFVSAKQSTGQDTEAELQDATLALHGLTVEDEGNYTCEFVTFPKGFVRGMTWLRV

SEQ ID NO: 897 - protein, 127 aa, Artificial Sequence
  CD112 v54 IgV
QDVRVQVLPEVWGQLGGTVELPCHLLPPVPGLHISLVTWQRPDAPANHQNVAAFHPKMGPSFPSPKPGSERLSFVSAKQSTGQDTEAELQDATLALHGLTVEDEGIYTCEFATFPKGFVRGMTWLRV

SEQ ID NO: 898 - protein, 127 aa, Artificial Sequence
  CD112 v55 IgV
QDVRVQVLPEVRGQVGGTVELPCHLLPPVPGLYISLVTWQRPDAPANHQNVAAFHPKMGPSFPSPKPGSERLSFVSAKQSTGQDTEAELRDATLALHGLTVEDEGNYTCEFATFPKGFVRGMTWLRV

SEQ ID NO: 899 - protein, 127 aa, Artificial Sequence
  CD112 v56 IgV
QDVRVQVLPEVRGQLGGTVELPCHLLPPVPGLYISLVTWQRPDAPAKHQNVAAFHPKMGPSFPSPKPGSERLSFVSAKQSTGQGTEAELQDATLALHGLTVEDEGIYTCEFATFPKGYVRGMTWLRV

SEQ ID NO: 900 - protein, 127 aa, Artificial Sequence
  CD112 v57 IgV
QDVRVQVLPEVRGQLGGTVELPCHLLPPVPGPYISLVTWQRPDAPANHQNVAAFHPKMGPSFPSPKPGSERLSFVSAKQSTGQDTEAELQDATLALHGLTVEDEGNYTCEFATFPKGFVRGMTWLRV

SEQ ID NO: 901 - protein, 127 aa, Artificial Sequence
  CD112 v58 IgV
QDVRVQVLPEVRGQLGGTVELPCHLLPPVPGLHISLVTWQRPDAPANHQNVAAFHPKMGPSFPSPKPGSERLSFVSAKRSTGQDTEAELQDATLALHGLTVEDEGNYTCEFVTFPKGYVRGMTWLRV

SEQ ID NO: 902 - protein, 127 aa, Artificial Sequence
  CD112 v59 IgV
QDVRVQVLPEVRGQLGGAVELPCHLLPPVPGLYISLVTWQRPDAPANHQNVAAFHPKMGPSFPSPKPGSERLSFVSAKQSTGQDTEAELQDATLALHGLTVEDEGIYTCEFATFPKGTVRGMTWLRV

SEQ ID NO: 903 - protein, 127 aa, Artificial Sequence
  CD112 v60 IgV
QDVRVQVLPEVRGQVGGTVELPCHLLPPVPGLHISLVTWQRPDAPANHQNVAAFHPKMGPSFPSPKPGSERLSFVSAKQSTGQDTEAELQDATLALHGLTVEDEGYYTCEFVTFPKGFVRGMTWLRV

SEQ ID NO: 904 - protein, 127 aa, Artificial Sequence
  CD112 v61 IgV
QDVRVQVLPEVRGQLGGTVELPCHLLPPVPGLYISLMTWQRPDAPANHQNVAAFHPKMGPSFPSPKPGSERLSFVSAKQSTGQDTEAELQDATLALHGLTVEDEGNYTCEFATFPKGFVRGMTWLRV

SEQ ID NO: 905 - protein, 127 aa, Artificial Sequence
  CD112 v62 IgV
QDVRVQVLPEVRGQLGGTVELPCHLLPPVPGLYISLVTWQRPDAPAKHQNVAAFHPKMGPSFPSPKPGSERLSFVSAKQSTGQDTEAELQDATLALHGLTVEDEGNYTCEFVTFPKGYVRGMTWLRV

SEQ ID NO: 906 - protein, 127 aa, Artificial Sequence
  CD112 v63 IgV
QDVRVQVLPEVRGQLGGTVELPCHLLPPVPGLYISLVTWQRPDAPTNHQNVAAFHPKMGPSFPSPKPGSERLSFVSAKQSTGQDTEAELQDATLALHGLTVEDEGNYTCEFVTFPKGSVRGMTWLRV

SEQ ID NO: 907 - protein, 127 aa, Artificial Sequence
  CD112 v64 IgV
QDVRVQVLPEVRGQLGGTVELPCHLLPSVPGLHISLVTWQRPDAPANHQNVAAFHPKMGPSFPSPKPGSERLSFVSAKQSTGQDTEAELQDATLALHGLTVEDEGIYTCEFATFPKGYVRGMTWLRV

SEQ ID NO: 908 - protein, 127 aa, Artificial Sequence
  CD112 v65 IgV
QDVRVQVLPEVRGQLGGTVELPCHLLPPVSGLHISLVTWQRPDAPAKHQNVAAFHPKMGPSFPSPKPGSERLSFMSAKRSTGQDTEAELQDATLALHGLTVEDEGIYTCEFATFPKGYVRGMTWLRV

SEQ ID NO: 909 - protein, 127 aa, Artificial Sequence
  CD112 v66 IgV
QDVRVQVLPEVRGQLGGTAELPCHLLPPVPGLYISLVTWQRPDAPAKHQNVAAFHPKMGPSFPSPKPGSERLSFVSAKQSTGQDTEAELQDATLALHGLTVEDEGYYTCEFATFPEGYVRGMTWLRV

SEQ ID NO: 910 - protein, 127 aa, Artificial Sequence
  CD112 v67 IgV
QDVRVQVLPEVRGQLGGTVELPCHLLPPVPGLYISLVTWQRPDAPANHQNVAAFHPKMGPSFPSPKPGSERLSFVSAKRSTGQDAEAELQDATLALHGLTVEDEGNYTCEFVTFPKGYVRGMTWLRV

SEQ ID NO: 911 - protein, 127 aa, Artificial Sequence
  CD112 v68 IgV
QDVRVQVLPEVRGQLGGTVELPCHLLPPVPGLYISLVTWQRPDAPANHQNVAAFHPKMGPSFPSPKPGSERLSFVSAKQSTGQDTEAELQDATLALHGLTMEDEGIYTCEFATFPKGYVRGMTWLRV

SEQ ID NO: 912 - protein, 127 aa, Artificial Sequence
  CD112 v69 IgV
QDVRVQVLPEVRGQLGGTVELPCHLLPPVPGLHISLVTWQRPDAPANHQNVAAFHPKMGPSFPSPKPGSERLSFVSAKRSTGQDTEAELQDATLALHGLTVEDEGIYTCEFVTFPKGTVRGMTWLRV

SEQ ID NO: 913 - protein, 127 aa, Artificial Sequence
  CD112 v70 IgV
QDVRVQVLPEVRGQLGGTVELPCHLLPPVPGLYISLVTWQRPDAPANHQNVAAFHPKMGPSFPSPKPGSERLSFVSAKRSTGQDTEAELQDATLALHGLTVEDEGNYTCEFVTFPKGSVRGMTWLRV

SEQ ID NO: 914 - protein, 127 aa, Artificial Sequence
  CD112 v71 IgV
QDVRVQVLPEVRGQLGGTVELPCHLLPPVPGLHISLVTWQRPDAPTNHQNVAAFHPKMGPSFPSPKPGSERLSFVSAKRSTGQDTEAELQDATLALHGLTVEDEGIYTCEFATFPKGFVRGMTWLRV

SEQ ID NO: 915 - protein, 127 aa, Artificial Sequence
  CD112 v72 IgV
QDVRVQVLPEVRGQLGGTVELPCHLLPPVPGLYISLVTWQRPDAPANHQNVAAFHPKMGPSFPSPKPGSERLSFVSAKQSTGQDTEAELQDATLALHGLTVEDEGNYTCEFVTFPKGSVRSMTWLRV

SEQ ID NO: 916 - protein, 127 aa, Artificial Sequence
  CD112 v73 IgV
QDVRVQVLPEVRGQLGGTVELPCHLLPPVPGLHISLVTWQRPDAPANHQNVAAFHPKMGPSFPSPKPGSERLSFVSAKRSTGQDTEAELQDATLALHGLTVEDEGIYTCEFATFPKGYVRGMTWLRV

SEQ ID NO: 917 - protein, 127 aa, Artificial Sequence
  CD112 v74 IgV
QDVRVQVLPEVRGQLGGTVELPCHLLPPVPGLHISLVTWQRPDAPANHQNVAAFHPKMGPSFPSPKPGSERLSFVSAKQSTGQDTEAELQDATLALHGLTVEDEGIYTCEFVTFPKGSVRGMTWLRV

SEQ ID NO: 918 - protein, 127 aa, Artificial Sequence
  CD112 v75 IgV
QDVRVQVLPEVRGQLGGTVELPCHLLPPVPGLHISLVTWQRPDAPTNHQNVAAFHPKMGPSFPSPKPGSERLSFVSAKQSTGQDTEAELQDATLALHGLTMEDEGNYTCEFVTFPKGTVRGMTWLRV

SEQ ID NO: 919 - protein, 127 aa, Artificial Sequence
  CD112 v76 IgV
QDVRVQVLPEVRGQLGGTVELPCHLLPPVPGPYISLVTWQRPDAPANHQNVAAFHPKMGPSFPSPKPGSERLSFVSAKQSTGQDTEAELQDATLALHGMTVEDEGIYTCEFATFPKGFVRGMTWLRV

SEQ ID NO: 920 - protein, 127 aa, Artificial Sequence
  CD112 v77 IgV
QDVRVQVLPEVRGQLGGTVELPCHLLPPVPGPYISLVTWQRPDAPANHQNVAAFHPKMGPSFPSPKPGSERLSFVSAKQSTGQDTEAELQDATLALHGLTVEDEGNYACEFATFPKGFVRGMTWLRV

SEQ ID NO: 921 - protein, 127 aa, Artificial Sequence
  CD112 v78 IgV
QDVRVQVLPEVWGQLGGTVELPCHLLPPVPGLYISLVTWQRPDAPANHQNVAAFHPKMGPSFPSPKPGSERLSFVSAKRSTGQDTEAELQDATLALHGLTVEDEGNYTCEFVTFPKGSVRGMTWLRV

SEQ ID NO: 922 - protein, 127 aa, Artificial Sequence
  CD112 v79 IgV
QDVRVQVLPEVRGQLGGTVELPCHLLPPVPGLHISLVTWQRPDAPANHQNVAAFHPKMGPSFPSPKPGSERLSFVSAKQSTGQDTEAELQDATLALHGLTVEDEGYYTCGFVTFPKGSVRGMTWLRV

SEQ ID NO: 923 - protein, 127 aa, Artificial Sequence
  CD112 v80 IgV
QDVRVQVLPEVRGQLGGTVELPCHLLPPVPGLHISLVTWQRPDAPANHQNVAAFHPKMGPSFPSPKPGSERLSFVSAKQSTGQDTEAELQDATLALHGLTVEDEGIYTCEFATFPKGYVRGMTWLRV

SEQ ID NO: 924 - protein, 127 aa, Artificial Sequence
  CD112 v81 IgV
QDVRVQVLPEVRGQLGGTVELPCHLLPPVPGLYISLVTWQRPDAPANHQNVAAFHPKMGPSFPSPKPGSERLSFVSAKRSTGQDTEAELQDATLALHGLTVEDEGNYTCEFATFPKGFVRGMTWLRV

SEQ ID NO: 925 - protein, 127 aa, Artificial Sequence
  CD112 v82 IgV
QDVRVQVLPEVRGQLGGTVELPCHLLPPVPGLHISLVTWQRPDAPANHQNVAAFHPKMGPSFPSPKPGSERLSFVSAKRSTGQDTEAELQDATLALHDLTMEDEGNYTCEFVTFPKGSVRGMTWLRV

SEQ ID NO: 926 - protein, 127 aa, Artificial Sequence
  CD112 v83 IgV
QDVRVQVLPEVRGQLGGTVELPCHLLPPVPGLYISLVTWQRPDAPAKHQNVAAFHPKMGPSFPSPKPGSERLSFVSAKQSSGQDTEAELQDATLALHGLTMEDEGNYTCEFVTFPKGFVRGMTWLRV

SEQ ID NO: 927 - protein, 127 aa, Artificial Sequence
  CD112 v84 IgV
QDVRVQVLPEVRGQLGGTVELPCHLLPPVPGLYISLVTWQRPDAPANHQNVAAFHPKMGPSFPSPKPGSERLSFVSAKQSTSQDTEAELQDATLALHGLTVEDEGNYTCEFATFPKGYVRGMTWLRV

SEQ ID NO: 928 - protein, 127 aa, Artificial Sequence
  CD112 v85 IgV
QDVRVQVLPEVRGQLGGTVELPCHLLPPVPGLHISLVTWQRPDAPANHQNVAAFHPKMGPSFPSPKPGSERLSFVSAKQSTGQDTEAELQDATLALHGLTVEDEGNYTCEFVTFPKGYVRGMTWLRV

SEQ ID NO: 929 - protein, 127 aa, Artificial Sequence
  CD112 v86 IgV
QDVRVQVLPEVRGQLGGTVELPCHLLPPVPGLHISLVTWQRPDAPAKHQNVAAFHPKMGPSFPSPKPGSERLSFVSAKRSTGQDTEAELQDATLALHGLTVEDEGYYTCEFVTFPKGSVRGMTWLRV

SEQ ID NO: 930 - protein, 127 aa, Artificial Sequence
  CD112 v87 IgV
QDVRVQVLPEVRGQLGGTVELPCHLLPPVPGLHISLVTWQRPDAPANHQNVAAFHPKMGPSFPSPKPGSERLSFVSAKQSTGQDTEAELQDATLALHGLTVEDEGNYTCEFATFPKGTVRGMTWLRV

SEQ ID NO: 931 - protein, 127 aa, Artificial Sequence
  CD112 v88 IgV
QDVRVQVLPEVWGQLGGTVELPCHLLPPVPGLHISLVTWQRPDAPANHQNVAAFHPKMGPSFPSPKPGSERLSFVSAKRSTGQDTEAELQDATLALHGLTMEDEGNYTCEFVTFPKGSVRGMTWLRV

SEQ ID NO: 932 - protein, 208 aa, Artificial Sequence
  CD80 v122 ECD
VIHVTKEVKEVATLSCGHNVSVEELAQTRIYWQKEKKMVLTMMSGDMNIWPEYKNRTIFDITNNLSIVIPALRPSDEGTYECVVLKYEKDAFKREHLAEVTLSVKADFPTPSISDFETPTSNIRRIICSTSGGFPEPHLSWLENGEELSAINTTVSQDPETELYAVSSKLDFNMTTNHSFMCLIKYGHLRVNQTFNWNTTKQEHFPDN

SEQ ID NO: 933 - protein, 208 aa, Artificial Sequence
  CD80 v123 ECD
VIHVTKEVKEVATLSCGHNVSVEELAQTRFYWQKEKKMVLTMMSGDMNIWPEYKNRTIFDITNNLSIVIPALRPSDEGTYECVVLKYEKDAFKREHLAEVTLSVKADFPTPSISDFETPTSNIRRIICSTSGGFPEPHLSWLENGEELSAINTTVSQDPETELYAVSSKLDFNMTTNHSFMCLIKYGHLRVNQTFNWNTTKQEHFPDN

SEQ ID NO: 934 - protein, 208 aa, Artificial Sequence
  CD80 v124 ECD
VIHVTKEVKEVATLSCGHNVSVEELAHTRIYWQKEKKMVLSMMSGDMNIWPEYKNRTIFDITNNLSIVILDLRPSDEGTYECVVLKYEKDAFKREHLAEVTLSVKADFPTPSISDFETPTSNIRRIICSTSGGFPEPHLSWLENGEELSAINTTVSQDPETELYAVSSKLDFNMTTNHSFMCLIKYGHLRVNQTFNWNTTKQEHFPDN

SEQ ID NO: 935 - protein, 208 aa, Artificial Sequence
  CD80 v125 ECD
VIHVTKEVKEVATLSCGHNVSVEELAQTRTYWQKEKKMVLTMMSGDMNIWPEYKNRTIFDITNNLSIVIRALRPSDEGTYECVVLKYEKDAFKREHLAEVTLSVKADFPTPSISDFETPTSNIRRIICSTSGGFPEPHLSWLENGEELSAINTTVSQDPETELYAVSSKLDFNMTTNHSFMCLIKYGHLRVNQTFNWNTTKQEHFPDN

SEQ ID NO: 936 - protein, 208 aa, Artificial Sequence
  CD80 v126 ECD
VIHVTKEVKEVARLSRGHNVSVEELAQTRIYWQKEKKMVLTMMSGDMNIWPEYKNRTIFDITNNLSIVIQDLRPSDEGTYECVVLKYEKDAFKREHLAEVTLSVKADFPTPSISDFETPTSNIRRIICSTSGGFPEPHLSWLENGEELSAINTTVSQDPETELYAVSSKLDFNMTTNHSFMCLIKYGHLRVNQTFNWNTTKQEHFPDN

SEQ ID NO: 937 - protein, 208 aa, Artificial Sequence
  CD80 v127 ECD
VIHVTKEVKEVATLSCGHNVSVEELAQTRIYWQKEKKMVLTMMSGDMNIWPEYKNRIIFDITNNLSIVILALRPSDEGTYECVVLKYEKDAFKREHLAEVTLSVKADFPTPSISDFETPTSNIRRIICSTSGGFPEPHLSWLENGEELSAINTTVSQDPETELYAVSSKLDFNMTTNHSFMCLIKYGHLRVNQTFNWNTTKQEHFPDN

SEQ ID NO: 938 - protein, 208 aa, Artificial Sequence
  CD80 v128 ECD
VIHVTKEVKEVATLSCGHNVSVEELAQTRIYWQKEKKMVLTMISGDMNIWPEYKNRTIFDITNNLSIVILALRPSDEGTYERVVLKYEKDAFKREHLAEVTLSVKADFPTPSISDFETPTSNIRRIICSTSGGFPEPHLSWLENGEELSAINTTVSQDPETELYAVSSKLDFNMTTNHSFMCLIKYGHLRVNQTFNWNTTKQEHFPDN

SEQ ID NO: 939 - protein, 208 aa, Artificial Sequence
  CD80 v130 ECD
VIHVTKEVKEVATLSCGHNVSLEELAQTRIYWQKEKKVVLTMMSGDTNIWPEYKNRTIFDITNNLSIVILDLRPSDEGTYECVVMKYEKDAFKREHLAEVTLSVKADFPTPSISDFETPTSNIRRIICSTSGGFPEPHLSWLENGEELSAINTTVSQDPETELYAVSSKLDFNMTTNHSFMCLIKYGHLRVNQTFNWNTTKQEHFPDN

SEQ ID NO: 940 - protein, 208 aa, Artificial Sequence
  CD80 v131 ECD
VIHVTKEVKEVATLSCGHNVSVEELAQTRVYWQKEKKMVLTMMSGDMNIWPEYKNRIIFDITNNLSIVIPDLRPSDEGTYECVVLKYEKDTFKREHLAEVTLSVKADFPTPSISDFETPTSNIRRIICSTSGGFPEPHLSWLENGEELSAINTTVSQDPETELYAVSSKLDFNMTTNHSFMCLIKYGHLRVNQTFNWNTTKQEHFPDN

SEQ ID NO: 941 - protein, 208 aa, Artificial Sequence
  CD80 v132 ECD
VIHVTKEVKEVATLSCGHNVSIEELAQTRIYWQKEKKMVLTMMSGDMNIWPEYKNRTIFDITNNLSIVIMDLRPSDEGTYECVVLKYEKDAFKREHLAEVTLSVKADFPTPSISDFETPTSNIRRIICSTSGGFPEPHLSWLENGEELSAINTTVSQDPETELYAVSSKLDFNMTTNHSFMCLIKYGHLRVNQTFNWNTTKQEHFPDN

SEQ ID NO: 942 - protein, 208 aa, Artificial Sequence
  CD80 v133 ECD
VIHVTKEVKEVATLSCGHNVSVEELAQTRIYWQKEKKMVLTMMSGDMNIWPEYKDRTIFDITNNLSIVIPALRPSDGGTYECVVLKYEKDAFKREHLAEVTLSVKADFPTPSISDFETPTSNIRRIICSTSGGFPEPHLSWLENGEELSAINTTVSQDPETELYAVSSKLDFNMTTNHSFMCLIKYGHLRVNQTFNWNTTKQEHFPDN

SEQ ID NO: 943 - protein, 208 aa, Artificial Sequence
  CD80 v134 ECD
VIHVTKEVKEVATLSCGHNVSVEELAQTRIYWQKEKKMVLTMMSGDMNIWPEYKNRAIFDITNNLSIVTLALRPSDEGTYECVVLKYEKDAFKREHLAEVTLSVKADFPTPSISDFETPTSNIRRIICSTSGGFPEPHLSWLENGEELSAINTTVSQDPETELYAVSSKLDFNMTTNHSFMCLIKYGHLRVNQTFNWNTTKQEHFPDN

SEQ ID NO: 944 - protein, 208 aa, Artificial Sequence
  CD80 v135 ECD
VIHVTKEVKEVATLSCGHNVSVEELAQTRIYWQKEKKMVLTMMSGDMNIWPEYKDRTIFDITNNLSIVILALRPSDEGTYECVVLMYEKDAFKREHLAEVTLSVKADFPTPSISDFETPTSNIRRIICSTSGGFPEPHLSWLENGEELSAINTTVSQDPETELYAVSSKLDFNMTTNHSFMCLIKYGHLRVNQTFNWNTTKQEHFPDN

SEQ ID NO: 945 - protein, 208 aa, Artificial Sequence
  CD80 v136 ECD
VIHVTKEVKEVATLSCGHNVSVEELAQTRIYWQKEKKMVLTMMSGDMNIWPEYKNRTIFDITNNLSIVILAPRPSDEGIYECVVLKYEKDAFKREHLAEVTLSVKADFPTPSISDFETPTSNIRRIICSTSGGFPEPHLSWLENGEELSAINTTVSQDPETELYAVSSKLDFNMTTNHSFMCLIKYGHLRVNQTFNWNTTKQEHFPDN

SEQ ID NO: 946 - protein, 208 aa, Artificial Sequence
  CD80 v137 ECD
VIHVTKEVKEVATLSCGHNVSVEELAQTRIYWQKEKKMVLTMMSGDMNIWPEYKNRTIFDITNNLSIVIPALRPSDEGTYECVVLKYEKDASKREHLAEVTLSVKADFPTPSISDFETPTSNIRRIICSTSGGFPEPHLSWLENGEELSAINTTVSQDPETELYAVSSKLDFNMTTNHSFMCLIKYGHLRVNQTFNWNTTKQEHFPDN

SEQ ID NO: 947 - protein, 208 aa, Artificial Sequence
  CD80 v138 ECD
VIHVTKEVKEVATLSCGHNVSVEELAQTRIYWQKEKKMVLTMMSGDMNIWPEYKNRTIFDITNNLSIVILALRPSDEGPYECVVLKYEKDAFKREHLAEVTLSVKADFPTPSISDFETPTSNIRRIICSTSGGFPEPHLSWLENGEELSAINTTVSQDPETELYAVSSKLDFNMTTNHSFMCLIKYGHLRVNQTFNWNTTKQEHFPDN

SEQ ID NO: 948 - protein, 208 aa, Artificial Sequence
  CD80 v139 ECD
VIHVTKEVKEVATLSCGHNVSVEELAQTRIYWQKDKKMVLTMMSGDINIWPEYKNRTIFDITNNPSIVILALRPSDEGTYECVVLKYEKNAFKREHLAEVTLSVKADFPTPSISDFETPTSNIRRIICSTSGGFPEPHLSWLENGEELSAINTTVSQDPETELYAVSSKLDFNMTTNHSFMCLIKYGHLRVNQTFNWNTTKQEHFPDN

SEQ ID NO: 949 - protein, 208 aa, Artificial Sequence
  CD80 v140 ECD
VIHVTKEVKEVATLSCGHNVSVEESAQTRIYWQKDKKMVLTMMSGDINIWPEYKNRTIFDITNNLSIVILALRPSDEGTYECVVLKYEKNAFKREHLAEVTLSVKADFPTPSISDFETPTSNIRRIICSTSGGFPEPHLSWLENGEELSAINTTVSQDPETELYAVSSKLDFNMTTNHSFMCLIKYGHLRVNQTFNWNTTKQEHFPDN

SEQ ID NO: 950 - protein, 208 aa, Artificial Sequence
  CD80 v141 ECD
VIHVTKEVKEVATLSCGHNVSVEELAQTRIYWQKEKKMVLTMMPGDMNIWPEYKNRTIFDITNNLSTVILALRSSDEGTYGCVVLKYEKDAFKRDHLAEVTLSVKADFPTPSISDFETPTSNIRRIICSTSGGFPEPHLSWLENGEELSAINTTVSQDPETELYAVSSKLDFNMTTNHSFMCLIKYGHLRVNQTFNWNTTKQEHFPDN

SEQ ID NO: 951 - protein, 208 aa, Artificial Sequence
  CD80 v142 ECD
VIHVTKEVKEVATLSCGHNVSVEELAQTRIYWQKEKKMVLTMMSGDMNIWPEYKNRTIFDITNNLSIVILDLRPSDEGTYECVVLKYEKDAFKREHLAEVTLSVKADFPTPSISDFETPTSNIRRIICSTSGGFPEPHLSWLENGEELSAINTTVSQDPETELYAVSSKLDFNMTTNHSFMCLIKYGHLRVNQTFNWNTTKQEHFPDN

SEQ ID NO: 952 - protein, 208 aa, Artificial Sequence
  CD80 v143 ECD
VIHVTKEVKEVAALSCGHNVSVEELAQTRIYWQKEKKMVLTMMSGDMNIWPEYKNRTIFDNTNNLSIVILDLRPSDEGTYECVVLKYEKDAFKREHLAEVTLSVKADFPTPSISDFETPTSNIRRIICSTSGGFPEPHLSWLENGEELSAINTTVSQDPETELYAVSSKLDFNMTTNHSFMCLIKYGHLRVNQTFNWNTTKQEHFPDN

SEQ ID NO: 953 - protein, 208 aa, Artificial Sequence
  CD80 v144 ECD
VIHVTKEVKEVATLSCGHNVSVEELAQTRIYWQKEKKMVLTMMSGDMNIWPEYKNRTIFDITNNLSIVILALRPSDEGTYKCVVLKYEKDSFKREHLAEVTLSVKADFPTPSISDFETPTSNIRRIICSTSGGFPEPHLSWLENGEELSAINTTVSQDPETELYAVSSKLDFNMTTNHSFMCLIKYGHLRVNQTFNWNTTKQEHFPDN

SEQ ID NO: 954 - protein, 208 aa, Artificial Sequence
  CD80 v145 ECD
VIHVTKEVKEVVTLSCGHNVSVEELAQTRIYWQKEKKMVLTMMSGDVNIWPEYKNRTIFDITNNLSIVIMALRPSDEGTYECVVLKYEKDAFKREHLAEVTLSVKADFPTPSISDFETPTSNIRRIICSTSGGFPEPHLSWLENGEELSAINTTVSQDPETELYAVSSKLDFNMTTNHSFMCLIKYGHLRVNQTFNWNTTKQEHFPDN

SEQ ID NO: 955 - protein, 208 aa, Artificial Sequence
  CD80 v146 ECD
VIHVTKEVKEVATLSCGHNVSVEELAQTRIYWQEEKKMVLAMMSGDMNIWPEYKNRTIFDITNNLSIVILAVRPSDEGTYECVVLKYEKDAFKREHLAEVTLSVKADFPTPSISDFETPTSNIRRIICSTSGGFPEPHLSWLENGEELSAINTTVSQDPETELYAVSSKLDFNMTTNHSFMCLIKYGHLRVNQTFNWNTTKQEHFPDN

SEQ ID NO: 956 - protein, 208 aa, Artificial Sequence
  CD80 v147 ECD
VIHVTKEVKEVATLSCGHNVSVEELAQTRIYWQKEKKMVLSMMSGDMNIWPEYKNRTIFDITNNLSIVILDLRPSDEGTYECVALKYEKDAFKREHLAEVTLSVKADFPTPSISDFETPTSNIRRIICSTSGGFPEPHLSWLENGEELSAINTTVSQDPETELYAVSSKLDFNMTTNHSFMCLIKYGHLRVNQTFNWNTTKQEHFPDN

SEQ ID NO: 957 - protein, 208 aa, Artificial Sequence
  CD80 v148 ECD
VIHVTKEVKEVATLSCGHNVSVEELAQTRIYWQKDKKMVLTMMSGDMNIWPEYKNRTIFDITNNLSIVILDLRPSDEGTYECVVLKYEKDAFKREHLAEVTLSVKADFPTPSISDFETPTSNIRRIICSTSGGFPEPHLSWLENGEELSAINTTVSQDPETELYAVSSKLDFNMTTNHSFMCLIKYGHLRVNQTFNWNTTKQEHFPDN

SEQ ID NO: 958 - protein, 208 aa, Artificial Sequence
  CD80 v149 ECD
VIHVTKEVKEVATLSCGHNVSVEELAQTRIYWQKDKKMVLTMMSGDINIWPEYKNRTIFDITNNLSIVILALRPSDEGTYECVVLKYEKDAFKREHLAEVTLSVKADFPTPSISDFETPTSNIRRIICSTSGGFPEPHLSWLENGEELSAINTTVSQDPETELYAVSSKLDFNMTTNHSFMCLIKYGHLRVNQTFNWNTTKQEHFPDN

SEQ ID NO: 959 - protein, 208 aa, Artificial Sequence
  CD80 v150 ECD
VIHVTKEVKEVATLSCGHNVSVEELAQTRIYWQKERKMVLTMMSGDMNIWPEYKNRTIFDITNNLSIVILALRPSDEATYECVVLKYEKDAFKREHLAEVTLSVKADFPTPSISDFETPTSNIRRIICSTSGGFPEPHLSWLENGEELSAINTTVSQDPETELYAVSSKLDFNMTTNHSFMCLIKYGHLRVNQTFNWNTTKQEHFPDN

SEQ ID NO: 960 - protein, 208 aa, Artificial Sequence
  CD80 v151 ECD
VIHVTKEVKEVATLSCGHNVSVEELAQTRIYWEKEKKMVLAMMSGDMNIWPEYKNRTIFDITNNLSIVILALRPSDEGTYECVVLKYEKDAFKREHLAEVTLSVKADFPTPSISDFETPTSNIRRIICSTSGGFPEPHLSWLENGEELSAINTTVSQDPETELYAVSSKLDFNMTTNHSFMCLIKYGHLRVNQTFNWNTTKQEHFPDN

SEQ ID NO: 961 - protein, 208 aa, Artificial Sequence
  CD80 v152 ECD
VIHVTKEVKEVATLSCGHNVSVEELAQTRIYWQKEKKMVLTMMSGDVHIWPEYKNRTIFDITNNLSIVILALRPSDEGTYECVVLKYEKDAFKREHLAEVTLSVKADFPTPSISDFETPTSNIRRIICSTSGGFPEPHLSWLENGEELSAINTTVSQDPETELYAVSSKLDFNMTTNHSFMCLIKYGHLRVNQTFNWNTTKQEHFPDN

SEQ ID NO: 962 - protein, 208 aa, Artificial Sequence
  CD80 v153 ECD
VIHVTKEVKEVATLSCGHNVSVEELAQTRIYWQKEKKMVLTMMSGDLNIWPEYKNRTIFDITNNLSIAILALRPSDEGTYECVVLKYEKDAFKREHLAEVTLSVKADFPTPSISDFETPTSNIRRIICSTSGGFPEPHLSWLENGEELSAINTTVSQDPETELYAVSSKLDFNMTTNHSFMCLIKYGHLRVNQTFNWNTTKQEHFPDN

SEQ ID NO: 963 - protein, 208 aa, Artificial Sequence
  CD80 v154 ECD
VIHVTKEVKEVATLSCGHNVSVEELAQTRIYWQKEKKMVLTMMPGDMNIWPEYKNRTIFDITNNLSIVILDLRPSDEGTYECVVLKYEKDAFKREHLAEVTLSVKADFPTPSISDFETPTSNIRRIICSTSGGFPEPHLSWLENGEELSAINTTVSQDPETELYAVSSKLDFNMTTNHSFMCLIKYGHLRVNQTFNWNTTKQEHFPDN

SEQ ID NO: 964 - protein, 208 aa, Artificial Sequence
  CD80 v155 ECD
VIHVTKEVKEVATLSCGHNVSVEELAHTRIYWQKEKKMVLTMISGDMNIWPEYKNRTIFDITNNLSIVILDLSPSDEGTYECVVLKYEKDAFKREHLAEVTLSVKADFPTPSISDFETPTSNIRRIICSTSGGFPEPHLSWLENGEELSAINTTVSQDPETELYAVSSKLDFNMTTNHSFMCLIKYGHLRVNQTFNWNTTKQEHFPDN

SEQ ID NO: 965 - protein, 208 aa, Artificial Sequence
  CD80 v156 ECD
  VARIANT (24)..(24): Xaa is unknown
VIHVTKEVKEVATLSCGHNVSVEXLAQTRIYWRKEKKMVLTMMSGDMNIWPEYNNRIIFDITNNLSVVILDLRPSDEGTYECVVLKYEKDAFKREHLAEVTLSVKADFPTPSISDFETPTSNIRRIICSTSGGFPEPHLSWLENGEELSAINTTVSQDPETELYAVSSKLDFNMTTNHSFMCLIKYGHLRVNQTFNWNTTKQEHFPDN

SEQ ID NO: 966 - protein, 208 aa, Artificial Sequence
  CD80 v157 ECD
VIHVTKEVKEVATLSCGHNVSVEELAQTRIYWQKDKKMVLTMMSGDMNIWPEYKNRIIFDITNNLSIVIQDLRPSDEGTYECVVLKYEKDAFKREHLAEVTLSVKADFPTPSISDFETPTSNIRRIICSTSGGFPEPHLSWLENGEELSAINTTVSQDPETELYAVSSKLDFNMTTNHSFMCLIKYGHLRVNQTFNWNTTKQEHFPDN

SEQ ID NO: 967 - protein, 208 aa, Artificial Sequence
  CD80 v158 ECD
VIHVTKEVKEVATLSCGHNVSVEELAQTRIYWQKEKKMVLTMMSGDINIWPEYKNRTIFDITNNLSIVILALRPSDEGTYECVVLKYDKDAFKREHLAEVTLSVKADFPTPSISDFETPTSNIRRIICSTSGGFPEPHLSWLENGEELSAINTTVSQDPETELYAVSSKLDFNMTTNHSFMCLIKYGHLRVNQTFNWNTTKQEHFPDN

SEQ ID NO: 968 - protein, 208 aa, Artificial Sequence
  CD80 v159 ECD
VIHVTKEVKEVATLSCGHNVSVEELAQTRIYWQKEKKMVLTIMSGDMNIWPEYKNRTIFDVTNNLSIVILDLRPSDEGTYECVVLKYEKDAFKREHLAEVTLSVKADFPTPSISDFETPTSNIRRIICSTSGGFPEPHLSWLENGEELSAINTTVSQDPETELYAVSSKLDFNMTTNHSFMCLIKYGHLRVNQTFNWNTTKQEHFPDN

SEQ ID NO: 969 - protein, 208 aa, Artificial Sequence
  CD80 v160 ECD
VIHVTKEVKEVATLSCGHNVSVEELAQTRIYWQKEKKMVLTMMSGDMNIWAEYKNRTIFDITNNLSIVILDLRPSDEGTYECVVLKYEKDAFKREHLAEVTLSVKADFPTPSISDFETPTSNIRRIICSTSGGFPEPHLSWLENGEELSAINTTVSQDPETELYAVSSKLDFNMTTNHSFMCLIKYGHLRVNQTFNWNTTKQEHFPDN

SEQ ID NO: 970 - protein, 208 aa, Artificial Sequence
  CD80 v161 ECD
VIHVTKEVKEVATLSCGYNVSVEELAQTRIYWQKEKKMVLTMMSGDINIWPEYKNRIIFDITNNLSIVILGLRPSDEGTYECVVLKYEKDAFKREHLAEVTLSVKADFPTPSISDFETPTSNIRRIICSTSGGFPEPHLSWLENGEELSAINTTVSQDPETELYAVSSKLDFNMTTNHSFMCLIKYGHLRVNQTFNWNTTKQEHFPDN

SEQ ID NO: 971 - protein, 208 aa, Artificial Sequence
  CD80 v162 ECD
VIHVTKEVKEVATLSCGHNISVEELAQTRIYWQKEKKMVLTMMSGDVNIWPEYKNRIIFDITNNLSIVILALRPSDEGTYECVILKYEKDAFKREHLAEVTLSVKADFPTPSISDFETPTSNIRRIICSTSGGFPEPHLSWLENGEELSAINTTVSQDPETELYAVSSKLDFNMTTNHSFMCLIKYGHLRVNQTFNWNTTKQEHFPDN

SEQ ID NO: 972 - protein, 208 aa, Artificial Sequence
  CD80 v163 ECD
VIHVTKEVKEVATLSCGHNISVEELAQTRIYWQKEKKMVLTMMSGDVNIWPEYKNRTIFDITNNLSIVILDLRPSDEGTYECVVLKYEKDAFKREHLAEVTLSVKADFPTPSISDFETPTSNIRRIICSTSGGFPEPHLSWLENGEELSAINTTVSQDPETELYAVSSKLDFNMTTNHSFMCLIKYGHLRVNQTFNWNTTKQEHFPDN

SEQ ID NO: 973 - protein, 208 aa, Artificial Sequence
  CD80 v164 ECD
VIHVTKEVKEVATLSCGHNVSVEELAQTRIYWQKEKKMVLTMMSGDMNIWPEYKNRTIFDITNNLSIVILDVRPSDEGTYECVVLKYEKDAFKRKHLAEVTLSVKADFPTPSISDFETPTSNIRRIICSTSGGFPEPHLSWLENGEELSAINTTVSQDPETELYAVSSKLDFNMTTNHSFMCLIKYGHLRVNQTFNWNTTKQEHFPDN

SEQ ID NO: 974 - protein, 208 aa, Artificial Sequence
  CD80 v165 ECD
VIHVTKEVKEVATLSCGHNVSLEELAQTRIYWQKGKKMVLTMMSGDMNIWPEYKNRTIFDITNNLSIVILDPRPSDEGTYECVVLKYEKDAFKREHLAEVTLSVKADFPTPSISDFETPTSNIRRIICSTSGGFPEPHLSWLENGEELSAINTTVSQDPETELYAVSSKLDFNMTTNHSFMCLIKYGHLRVNQTFNWNTTKQEHFPDN

SEQ ID NO: 975 - protein, 208 aa, Artificial Sequence; identical to SEQ ID NO: 957
  CD80 v166 ECD

SEQ ID NO: 976 - protein, 208 aa, Artificial Sequence
  CD80 v167 ECD
VIHVTKEVKEVATLSCGHNVSVEELAQTRIYWQKDKKMVLTMMSGDMNIWPEYKNRTIFDITNNLSLVILDLRPSDEGTYECVVLKYEKDAFKREHLAEVTLSVKADFPTPSISDFETPTSNIRRIICSTSGGFPEPHLSWLENGEELSAINTTVSQDPETELYAVSSKLDFNMTTNHSFMCLIKYGHLRVNQTFNWNTTKQEHFPDN

SEQ ID NO: 977 - protein, 208 aa, Artificial Sequence
  CD80 v168 ECD
VIHVTKEVKEVATLSCGHNVSVEELAHTRIYWQKGKKMVLTMMSGDMNIWPEYKNRTIFDITNNLSIVILDPRPSDEGIYECVVLKYEKDAFKREHLAEVTLSVKADFPTPSISDFETPTSNIRRIICSTSGGFPEPHLSWLENGEELSAINTTVSQDPETELYAVSSKLDFNMTTNHSFMCLIKYGHLRVNQTFNWNTTKQEHFPDN

SEQ ID NO: 978 - protein, 208 aa, Artificial Sequence
  CD80 v169 ECD
VIHVTKEVKEVARLSCGHNVSVEELAQTRIYWQKEKKMVLTVMSGDINIWPEYKNRTIFDITNNLSIVILDLRPSDEGTYECVVLKYEKDAFKREHLAEVTLSVKADFPTPSISDFETPTSNIRRIICSTSGGFPEPHLSWLENGEELSAINTTVSQDPETELYAVSSKLDFNMTTNHSFMCLIKYGHLRVNQTFNWNTTKQEHFPDN

SEQ ID NO: 979 - protein, 208 aa, Artificial Sequence
  CD80 v170 ECD
VIHVTKEVKEVATLSCGHNVSVEELAQTRIYWQKDKKMVLTMMSGDMNIWPEYKNRTIFDITNNLSIVILALRPSDEGTYECVVLKYEKDAFKREHLAEVTLSVKADFPTPSISDFETPTSNIRRIICSTSGGFPEPHLSWLENGEELSAINTTVSQDPETELYAVSSKLDFNMTTNHSFMCLIKYGHLRVNQTFNWNTTKQEHFPDN

SEQ ID NO: 980 - protein, 208 aa, Artificial Sequence
  CD80 v171 ECD
VIHVTKEVKEVATLSCGHNVSVEELAQTRIYWQKDKKMVLTMMSGDINIWPEYKNRTIFDITNNLSIVIMALRPSDEGTYECVVLKYEKDAFKREHLAEVTLSVKADFPTPSISDFETPTSNIRRIICSTSGGFPEPHLSWLENGEELSAINTTVSQDPETELYAVSSKLDFNMTTNHSFMCLIKYGHLRVNQTFNWNTTKQEHFPDN

SEQ ID NO: 981 - protein, 208 aa, Artificial Sequence
  CD80 v172 ECD
VIHVTKEVKEVATLSCGHNVSVEELAQTRIYWQKDKKMVLTMMSGDMNIWPEYKNRTIFDITNNLSIVILDVRPSDEGTYECVVLKYEKDAFKREHLAEVTLSVKADFPTPSISDFETPTSNIRRIICSTSGGFPEPHLSWLENGEELSAINTTVSQDPETELYAVSSKLDFNMTTNHSFMCLIKYGHLRVNQTFNWNTTKQEHFPDN

SEQ ID NO: 982 - protein, 208 aa, Artificial Sequence
  CD80 v173 ECD
VIHVTKEVKEVATLSCGHNVSVEELAQTRIYWQKDKKMVLTMLSGDMNIWPEYKNRTIFDITNNLSIVIMALRPSDEGTYECVVLKYEKDAFKREHLAEVTLSVKADFPTPSISDFETPTSNIRRIICSTSGGFPEPHLSWLENGEELSAINTTVSQDPETELYAVSSKLDFNMTTNHSFMCLIKYGHLRVNQTFNWNTTKQEHFPDN

SEQ ID NO: 983 - protein, 208 aa, Artificial Sequence
  CD80 v174 ECD
VIHVTKEVKEVATLSCGHNVSVEELPQTRIYWQKDKKMVLTMISGDMNIWPEYKNRTIFDITNNLSIVILALRPSDEGTYECVVQKYDKDAFKREHLAEVTLSVKADFPTPSISDFETPTSNIRRIICSTSGGFPEPHLSWLENGEELSAINTTVSQDPETELYAVSSKLDFNMTTNHSFMCLIKYGHLRVNQTFNWNTTKQEHFPDN

SEQ ID NO: 984 - protein, 208 aa, Artificial Sequence
  CD80 v175 ECD
VIHVTKEVKEVATLSCGHNVSVEELAQTRIYWQKDKKMVLTMMSGVMNIWPEYKNRTIFDITNNLSIVILALRPSDEGTYECVVQKYEKDAFKREHLAEVTLSVKADFPTPSISDFETPTSNIRRIICSTSGGFPEPHLSWLENGEELSAINTTVSQDPETELYAVSSKLDFNMTTNHSFMCLIKYGHLRVNQTFNWNTTKQEHFPDN

SEQ ID NO: 985 - protein, 208 aa, Artificial Sequence
  CD80 v176 ECD
VIHVTKEVKEVATLSCGHNVSVEELALTRIYWQKDKKMVLTMMSGDINIWPEYKNRIIFDITNNLSIVIQALRPSDEGTYECVVLKYDKDAFKREHLAEVTLSVKADFPTPSISDFETPTSNIRRIICSTSGGFPEPHLSWLENGEELSAINTTVSQDPETELYAVSSKLDFNMTTNHSFMCLIKYGHLRVNQTFNWNTTKQEHFPDN

SEQ ID NO: 986 - protein, 208 aa, Artificial Sequence
  CD80 v177 ECD
VIHVTKEVKEVATLSCGHNVSVEELAQTRIYWQKEKKMVLTMMSGDVNIWPEYKNRTIFDITNNLSIVFLDLRPSDEGTYECIVLKYEKDAFKREHLAEVTLSVKADFPTPSISDFETPTSNIRRIICSTSGGFPEPHLSWLENGEELSAINTTVSQDPETELYAVSSKLDFNMTTNHSFMCLIKYGHLRVNQTFNWNTTKQEHFPDN

SEQ ID NO: 987 - protein, 208 aa, Artificial Sequence
  CD80 v178 ECD
VIHVTKEVKEVATLSCGHNVSVEELAQTRIYWQKDKKMVLTMMSGDMNIWPEYKNRAIFDITNNLSIVILDLRPSDEGTYECVVQKYEKDAFKREHLAEVTLSVKADFPTPSISDFETPTSNIRRIICSTSGGFPEPHLSWLENGEELSAINTTVSQDPETELYAVSSKLDFNMTTNHSFMCLIKYGHLRVNQTFNWNTTKQEHFPDN

SEQ ID NO: 988 - protein, 208 aa, Artificial Sequence
  CD80 v179 ECD
VIHVTKEVKEVATLSCGYNVSVEELTQTRIYWQKDKKMVLTMMSGDMNIWPEYKNRTIFDITNNLSIVILDLRPSDEGTYECVVQKYEKDAFKREHLAEVTLSVKADFPTPSISDFETPTSNIRRIICSTSGGFPEPHLSWLENGEELSAINTTVSQDPETELYAVSSKLDFNMTTNHSFMCLIKYGHLRVNQTFNWNTTKQEHFPDN

SEQ ID NO: 989 - protein, 208 aa, Artificial Sequence
  CD80 v180 ECD
VIHVTKEVKEVATLSCGHNVSVEELAQTRIYWQKDKKMVLTMMSGDLNIWPEYKNRTIFDITNNLSIVILALRPSDEGTYECVVLKYEKDAFKREHLAEVTLSVKADFPTPSISDFETPTSNIRRIICSTSGGFPEPHLSWLENGEELSAINTTVSQDPETELYAVSSKLDFNMTTNHSFMCLIKYGHLRVNQTFNWNTTKQEHFPDN

SEQ ID NO: 990 - protein, 208 aa, Artificial Sequence
  CD80 v181 ECD
VIHVTKEVKEVATLSCGHNVSVDELAQTRIYWQKEKKMVLTVISGDMNIWPEYKNRTVFDITNNLSIVIRALRPSDEGTYECVVLKYEKDAFKREHLAEVTLSVKADFPTPSISDFETPTSNIRRIICSTSGGFPEPHLSWLENGEELSAINTTVSQDPETELYAVSSKLDFNMTTNHSFMCLIKYGHLRVNQTFNWNTTKQEHFPDN

SEQ ID NO: 991 - protein, 208 aa, Artificial Sequence
  CD80 v182 ECD
VIHVTKEVKEVATLSCGHNVSVEELAQTRIYWQKEKKMVLTMMSGDMNIWPEYKNRTIFDITNNLSIMIMDLRPSDEGTYECVVLKYEKDAFKRKHLAEVTLSVKADFPTPSISDFETPTSNIRRIICSTSGGFPEPHLSWLENGEELSAINTTVSQDPETELYAVSSKLDFNMTTNHSFMCLIKYGHLRVNQTFNWNTTKQEHFPDN

SEQ ID NO: 992 - protein, 208 aa, Artificial Sequence
  CD80 v183 ECD
VIHVTKEVKEVATLSCGHNVSVEELAQTRIYWQKEKKMVLTMMSGDMNIWPEYKIRIIFDITNNLSIVFLALRPSDEGTYECVVLKYEKDAFKREHLAEVTLSVKADFPTPSISDFETPTSNIRRIICSTSGGFPEPHLSWLENGEELSAINTTVSQDPETELYAVSSKLDFNMTTNHSFMCLIKYGHLRVNQTFNWNTTKQEHFPDN

SEQ ID NO: 993 - protein, 208 aa, Artificial Sequence
  CD80 v184 ECD
VIHVTKEVKEVATLSCGHNVSVEELAQTRIYWQKDKKMVLTMISGDMNIWPEYKNRTIFDITNNLSIVILDLRPSDEGTYECVVLKYEKDAFKREHLAEVTLSVKADFPTPSISDFETPTSNIRRIICSTSGGFPEPHLSWLENGEELSAINTTVSQDPETELYAVSSKLDFNMTTNHSFMCLIKYGHLRVNQTFNWNTTKQEHFPDN

SEQ ID NO: 994 - protein, 208 aa, Artificial Sequence
  CD80 v185 ECD
VIHVTKEVKEVATLSCGHNVSVEELAQTRIYWQKEKKMVLSMMSGDMNIWPEYKNRIIFDITNNLSIVIRALRPSDEGTYECVVLKYEKDAFKREHLAEVTLSVKADFPTPSISDFETPTSNIRRIICSTSGGFPEPHLSWLENGEELSAINTTVSQDPETELYAVSSKLDFNMTTNHSFMCLIKYGHLRVNQTFNWNTTKQEHFPDN

SEQ ID NO: 995 - protein, 208 aa, Artificial Sequence
  CD80 v186 ECD
VIHVTKEVKEVATLSCGYNVSVEELAQTRIYWQKEKKMVLTMMSGDMNIWPEYKNRTIFDITNNLSIVILDPRPSDEGTYECVVLKYVKDAFKREHLAEVTLSVKADFPTPSISDFETPTSNIRRIICSTSGGFPEPHLSWLENGEELSAINTTVSQDPETELYAVSSKLDFNMTTNHSFMCLIKYGHLRVNQTFNWNTTKQEHFPDN

SEQ ID NO: 996 - protein, 208 aa, Artificial Sequence
  CD80 v187 ECD
VIHVTKEVKEVATLSCGHNISVEELAQTRIYWQKEKKMVLTMMSGDMNIWPEYKNRTIFDITNNLSIVILDLRPSDEGTYECVVLKYEKDAFKREHLAEVTLSVKADFPTPSISDFETPTSNIRRIICSTSGGFPEPHLSWLENGEELSAINTTVSQDPETELYAVSSKLDFNMTTNHSFMCLIKYGHLRVNQTFNWNTTKQEHFPDN

SEQ ID NO: 997 - protein, 208 aa, Artificial Sequence
  CD80 v188 ECD
VIHVTKEVKEVATLSCGHNVSVGELSQTRIYWQKDKKMVLTMMSGDMNIWPEYKNRTIFDINNNLSIVILDVRPSDEGTYECVVMKYEKDAFKREHLAEVTLSVKADFPTPSISDFETPTSNIRRIICSTSGGFPEPHLSWLENGEELSAINTTVSQDPETELYAVSSKLDFNMTTNHSFMCLIKYGHLRVNQTFNWNTTKQEHFPDN

SEQ ID NO: 998 - protein, 208 aa, Artificial Sequence
  CD80 v189 ECD
VIHVTKEVKEVTTLSCGHNVSVEDLAQTRIYWQKDKKMVLTMMSGVMNIWPEYKNRTIFDVTNNLSIVILAPRPSDEGTYECVVLKYEKDAFKRVHLAEVTLSVKADFPTPSISDFETPTSNIRRIICSTSGGFPEPHLSWLENGEELSAINTTVSQDPETELYAVSSKLDFNMTTNHSFMCLIKYGHLRVNQTFNWNTTKQEHFPDN

SEQ ID NO: 999 - protein, 208 aa, Artificial Sequence
  CD80 v190 ECD
VIHVTKEVKEVATLSCGHNVSLEELAQTRIYWQKDKKMVLTMLSGDMNIWPEYKNRTIFDITNNLSIVILGLRPSHEGTYECVVLKYEKDAFKREHLAEVTLSVKADFPTPSISDFETPTSNIRRIICSTSGGFPEPHLSWLENGEELSAINTTVSQDPETELYAVSSKLDFNMTTNHSFMCLIKYGHLRVNQTFNWNTTKQEHFPDN

SEQ ID NO: 1000 - protein, 208 aa, Artificial Sequence
  CD80 v191 ECD
VIHVTKEVKEVATLSCGHNVSVEELAQTRIYWQKGKKMVLTMMSGDMNIWPEYENRTIFDITNNLSIVILDPRPSDEGTYECVVLKYEKDAFKREHLAEVTLSVKADFPTPSISDFETPTSNIRRIICSTSGGFPEPHLSWLENGEELSAINTTVSQDPETELYAVSSKLDFNMTTNHSFMCLIKYGHLRVNQTFNWNTTKQEHFPDN

SEQ ID NO: 1001 - protein, 208 aa, Artificial Sequence
  CD80 v192 ECD
VIHVTKEVKEVATLSCGHNVSVEELAQTRIYWQKEKKMVLTMMSGDMNIWPEYKNRTIFDITNNLSIVIQDLRPSDEGTYECVVLKYEKDAFKREHLAEVTLSVKADFPTPSISDFETPTSNIRRIICSTSGGFPEPHLSWLENGEELSAINTTVSQDPETELYAVSSKLDFNMTTNHSFMCLIKYGHLRVNQTFNWNTTKQEHFPDN

SEQ ID NO: 1002 - protein, 208 aa, Artificial Sequence
  CD80 v193 ECD
VIHVTKEVKEVATLSCGHNVSVEELEQTRIYWQKDKKMVLTMMSGDLNIWPEYKNRTIFDITNNLSIVILALRPSDEGTYECVVQKYEKDAFKREHLAEVTLSVKADFPTPSISDFETPTSNIRRIICSTSGGFPEPHLSWLENGEELSAINTTVSQDPETELYAVSSKLDFNMTTNHSFMCLIKYGHLRVNQTFNWNTTKQEHFPDN

SEQ ID NO: 1003 - protein, 208 aa, Artificial Sequence
  CD80 v194 ECD
VIHVTKEVKEVATLSCGHNVSVEELAQTRIYWQKEKKMVLTMMSGEMNIWPEYKNRTIFDITNNLSIVILDLRPSDEGTYECVVLKYEKDAFKREHLAEVTLSVKADFPTPSISDFETPTSNIRRIICSTSGGFPEPHLSWLENGEELSAINTTVSQDPETELYAVSSKLDFNMTTNHSFMCLIKYGHLRVNQTFNWNTTKQEHFPDN

SEQ ID NO: 1004 - protein, 208 aa, Artificial Sequence
  CD80 v195 ECD
VIHVTKEVKEVATLSCGHNVSVEELAQTRIHWQKDKKMVLSMMSGDMNIWPEYKNRTIFDITNNLSILILALRPSDEGTYECVVLKYEKDAFRWEHLAEVTLSVKADFPTPSISDFETPTSNIRRIICSTSGGFPEPHLSWLENGEELSAINTTVSQDPETELYAVSSKLDFNMTTNHSFMCLIKYGHLRVNQTFNWNTTKQEHFPDN

SEQ ID NO: 1005 - protein, 101 aa, Artificial Sequence
  CD80 WT IgV
VIHVTKEVKEVATLSCGHNVSVEELAQTRIYWQKEKKMVLTMMSGDMNIWPEYKNRTIFDITNNLSIVILALRPSDEGTYECVVLKYEKDAFKREHLAEVT

SEQ ID NO: 1006 - protein, 101 aa, Artificial Sequence
  CD80 v122 IgV
VIHVTKEVKEVATLSCGHNVSVEELAQTRIYWQKEKKMVLTMMSGDMNIWPEYKNRTIFDITNNLSIVIPALRPSDEGTYECVVLKYEKDAFKREHLAEVT

SEQ ID NO: 1007 - protein, 101 aa, Artificial Sequence
  CD80 v123 IgV
VIHVTKEVKEVATLSCGHNVSVEELAQTRFYWQKEKKMVLTMMSGDMNIWPEYKNRTIFDITNNLSIVIPALRPSDEGTYECVVLKYEKDAFKREHLAEVT

SEQ ID NO: 1008 - protein, 101 aa, Artificial Sequence
  CD80 v124 IgV
VIHVTKEVKEVATLSCGHNVSVEELAHTRIYWQKEKKMVLSMMSGDMNIWPEYKNRTIFDITNNLSIVILDLRPSDEGTYECVVLKYEKDAFKREHLAEVT

SEQ ID NO: 1009 - protein, 101 aa, Artificial Sequence
  CD80 v125 IgV
VIHVTKEVKEVATLSCGHNVSVEELAQTRTYWQKEKKMVLTMMSGDMNIWPEYKNRTIFDITNNLSIVIRALRPSDEGTYECVVLKYEKDAFKREHLAEVT

SEQ ID NO: 1010 - protein, 101 aa, Artificial Sequence
  CD80 v126 IgV
VIHVTKEVKEVARLSRGHNVSVEELAQTRIYWQKEKKMVLTMMSGDMNIWPEYKNRTIFDITNNLSIVIQDLRPSDEGTYECVVLKYEKDAFKREHLAEVT

SEQ ID NO: 1011 - protein, 101 aa, Artificial Sequence
  CD80 v127 IgV
VIHVTKEVKEVATLSCGHNVSVEELAQTRIYWQKEKKMVLTMMSGDMNIWPEYKNRIIFDITNNLSIVILALRPSDEGTYECVVLKYEKDAFKREHLAEVT

SEQ ID NO: 1012 - protein, 101 aa, Artificial Sequence
  CD80 v128 IgV
VIHVTKEVKEVATLSCGHNVSVEELAQTRIYWQKEKKMVLTMISGDMNIWPEYKNRTIFDITNNLSIVILALRPSDEGTYERVVLKYEKDAFKREHLAEVT

SEQ ID NO: 1013 - protein, 101 aa, Artificial Sequence
  CD80 v130 IgV
VIHVTKEVKEVATLSCGHNVSLEELAQTRIYWQKEKKVVLTMMSGDTNIWPEYKNRTIFDITNNLSIVILDLRPSDEGTYECVVMKYEKDAFKREHLAEVT

SEQ ID NO: 1014 - protein, 101 aa, Artificial Sequence
  CD80 v131 IgV
VIHVTKEVKEVATLSCGHNVSVEELAQTRVYWQKEKKMVLTMMSGDMNIWPEYKNRIIFDITNNLSIVIPDLRPSDEGTYECVVLKYEKDTFKREHLAEVT

SEQ ID NO: 1015 - protein, 101 aa, Artificial Sequence
  CD80 v132 IgV
VIHVTKEVKEVATLSCGHNVSIEELAQTRIYWQKEKKMVLTMMSGDMNIWPEYKNRTIFDITNNLSIVIMDLRPSDEGTYECVVLKYEKDAFKREHLAEVT

SEQ ID NO: 1016 - protein, 101 aa, Artificial Sequence
  CD80 v133 IgV
VIHVTKEVKEVATLSCGHNVSVEELAQTRIYWQKEKKMVLTMMSGDMNIWPEYKDRTIFDITNNLSIVIPALRPSDGGTYECVVLKYEKDAFKREHLAEVT

SEQ ID NO: 1017 - protein, 101 aa, Artificial Sequence
  CD80 v134 IgV
VIHVTKEVKEVATLSCGHNVSVEELAQTRIYWQKEKKMVLTMMSGDMNIWPEYKNRAIFDITNNLSIVTLALRPSDEGTYECVVLKYEKDAFKREHLAEVT

SEQ ID NO: 1018 - protein, 101 aa, Artificial Sequence
  CD80 v135 IgV
VIHVTKEVKEVATLSCGHNVSVEELAQTRIYWQKEKKMVLTMMSGDMNIWPEYKDRTIFDITNNLSIVILALRPSDEGTYECVVLMYEKDAFKREHLAEVT

SEQ ID NO: 1019 - protein, 101 aa, Artificial Sequence
  CD80 v136 IgV
VIHVTKEVKEVATLSCGHNVSVEELAQTRIYWQKEKKMVLTMMSGDMNIWPEYKNRTIFDITNNLSIVILAPRPSDEGIYECVVLKYEKDAFKREHLAEVT

SEQ ID NO: 1020 - protein, 101 aa, Artificial Sequence
  CD80 v137 IgV
VIHVTKEVKEVATLSCGHNVSVEELAQTRIYWQKEKKMVLTMMSGDMNIWPEYKNRTIFDITNNLSIVIPALRPSDEGTYECVVLKYEKDASKREHLAEVT

SEQ ID NO: 1021 - protein, 101 aa, Artificial Sequence
  CD80 v138 IgV
VIHVTKEVKEVATLSCGHNVSVEELAQTRIYWQKEKKMVLTMMSGDMNIWPEYKNRTIFDITNNLSIVILALRPSDEGPYECVVLKYEKDAFKREHLAEVT

SEQ ID NO: 1022 - protein, 101 aa, Artificial Sequence
  CD80 v139 IgV
VIHVTKEVKEVATLSCGHNVSVEELAQTRIYWQKDKKMVLTMMSGDINIWPEYKNRTIFDITNNPSIVILALRPSDEGTYECVVLKYEKNAFKREHLAEVT

SEQ ID NO: 1023 - protein, 101 aa, Artificial Sequence
  CD80 v140 IgV
VIHVTKEVKEVATLSCGHNVSVEESAQTRIYWQKDKKMVLTMMSGDINIWPEYKNRTIFDITNNLSIVILALRPSDEGTYECVVLKYEKNAFKREHLAEVT

SEQ ID NO: 1024 - protein, 101 aa, Artificial Sequence
  CD80 v141 IgV
VIHVTKEVKEVATLSCGHNVSVEELAQTRIYWQKEKKMVLTMMPGDMNIWPEYKNRTIFDITNNLSTVILALRSSDEGTYGCVVLKYEKDAFKRDHLAEVT

SEQ ID NO: 1025 - protein, 101 aa, Artificial Sequence
  CD80 v142 IgV
VIHVTKEVKEVATLSCGHNVSVEELAQTRIYWQKEKKMVLTMMSGDMNIWPEYKNRTIFDITNNLSIVILDLRPSDEGTYECVVLKYEKDAFKREHLAEVT

SEQ ID NO: 1026 - protein, 101 aa, Artificial Sequence
  CD80 v143 IgV
VIHVTKEVKEVAALSCGHNVSVEELAQTRIYWQKEKKMVLTMMSGDMNIWPEYKNRTIFDNTNNLSIVILDLRPSDEGTYECVVLKYEKDAFKREHLAEVT

SEQ ID NO: 1027 - protein, 101 aa, Artificial Sequence
  CD80 v144 IgV
VIHVTKEVKEVATLSCGHNVSVEELAQTRIYWQKEKKMVLTMMSGDMNIWPEYKNRTIFDITNNLSIVILALRPSDEGTYKCVVLKYEKDSFKREHLAEVT

SEQ ID NO: 1028 - protein, 101 aa, Artificial Sequence
  CD80 v145 IgV
VIHVTKEVKEVVTLSCGHNVSVEELAQTRIYWQKEKKMVLTMMSGDVNIWPEYKNRTIFDITNNLSIVIMALRPSDEGTYECVVLKYEKDAFKREHLAEVT

SEQ ID NO: 1029 - protein, 101 aa, Artificial Sequence
  CD80 v146 IgV
VIHVTKEVKEVATLSCGHNVSVEELAQTRIYWQEEKKMVLAMMSGDMNIWPEYKNRTIFDITNNLSIVILAVRPSDEGTYECVVLKYEKDAFKREHLAEVT

SEQ ID NO: 1030 - protein, 101 aa, Artificial Sequence
  CD80 v147 IgV
VIHVTKEVKEVATLSCGHNVSVEELAQTRIYWQKEKKMVLSMMSGDMNIWPEYKNRTIFDITNNLSIVILDLRPSDEGTYECVALKYEKDAFKREHLAEVT

SEQ ID NO: 1031 - protein, 101 aa, Artificial Sequence
  CD80 v148 IgV
VIHVTKEVKEVATLSCGHNVSVEELAQTRIYWQKDKKMVLTMMSGDMNIWPEYKNRTIFDITNNLSIVILDLRPSDEGTYECVVLKYEKDAFKREHLAEVT

SEQ ID NO: 1032 - protein, 101 aa, Artificial Sequence
  CD80 v149 IgV
VIHVTKEVKEVATLSCGHNVSVEELAQTRIYWQKDKKMVLTMMSGDINIWPEYKNRTIFDITNNLSIVILALRPSDEGTYECVVLKYEKDAFKREHLAEVT

SEQ ID NO: 1033 - protein, 101 aa, Artificial Sequence
  CD80 v150 IgV
VIHVTKEVKEVATLSCGHNVSVEELAQTRIYWQKERKMVLTMMSGDMNIWPEYKNRTIFDITNNLSIVILALRPSDEATYECVVLKYEKDAFKREHLAEVT

SEQ ID NO: 1034 - protein, 101 aa, Artificial Sequence
  CD80 v151 IgV
VIHVTKEVKEVATLSCGHNVSVEELAQTRIYWEKEKKMVLAMMSGDMNIWPEYKNRTIFDITNNLSIVILALRPSDEGTYECVVLKYEKDAFKREHLAEVT

SEQ ID NO: 1035 - protein, 101 aa, Artificial Sequence
  CD80 v152 IgV
VIHVTKEVKEVATLSCGHNVSVEELAQTRIYWQKEKKMVLTMMSGDVHIWPEYKNRTIFDITNNLSIVILALRPSDEGTYECVVLKYEKDAFKREHLAEVT

SEQ ID NO: 1036 - protein, 101 aa, Artificial Sequence
  CD80 v153 IgV
VIHVTKEVKEVATLSCGHNVSVEELAQTRIYWQKEKKMVLTMMSGDLNIWPEYKNRTIFDITNNLSIAILALRPSDEGTYECVVLKYEKDAFKREHLAEVT

SEQ ID NO: 1037 - protein, 101 aa, Artificial Sequence
  CD80 v154 IgV
VIHVTKEVKEVATLSCGHNVSVEELAQTRIYWQKEKKMVLTMMPGDMNIWPEYKNRTIFDITNNLSIVILDLRPSDEGTYECVVLKYEKDAFKREHLAEVT

SEQ ID NO: 1038 - protein, 101 aa, Artificial Sequence
  CD80 v155 IgV
VIHVTKEVKEVATLSCGHNVSVEELAHTRIYWQKEKKMVLTMISGDMNIWPEYKNRTIFDITNNLSIVILDLSPSDEGTYECVVLKYEKDAFKREHLAEVT

SEQ ID NO: 1039 - protein, 101 aa, Artificial Sequence
  CD80 v156 IgV
  VARIANT (24)..(24): Xaa is unknown
VIHVTKEVKEVATLSCGHNVSVEXLAQTRIYWRKEKKMVLTMMSGDMNIWPEYNNRIIFDITNNLSVVILDLRPSDEGTYECVVLKYEKDAFKREHLAEVT

SEQ ID NO: 1040 - protein, 101 aa, Artificial Sequence
  CD80 v157 IgV
VIHVTKEVKEVATLSCGHNVSVEELAQTRIYWQKDKKMVLTMMSGDMNIWPEYKNRIIFDITNNLSIVIQDLRPSDEGTYECVVLKYEKDAFKREHLAEVT

SEQ ID NO: 1041 - protein, 101 aa, Artificial Sequence
  CD80 v158 IgV
VIHVTKEVKEVATLSCGHNVSVEELAQTRIYWQKEKKMVLTMMSGDINIWPEYKNRTIFDITNNLSIVILALRPSDEGTYECVVLKYDKDAFKREHLAEVT

SEQ ID NO: 1042 - protein, 101 aa, Artificial Sequence
  CD80 v159 IgV
VIHVTKEVKEVATLSCGHNVSVEELAQTRIYWQKEKKMVLTIMSGDMNIWPEYKNRTIFDVTNNLSIVILDLRPSDEGTYECVVLKYEKDAFKREHLAEVT

SEQ ID NO: 1043 - protein, 101 aa, Artificial Sequence
  CD80 v160 IgV
VIHVTKEVKEVATLSCGHNVSVEELAQTRIYWQKEKKMVLTMMSGDMNIWAEYKNRTIFDITNNLSIVILDLRPSDEGTYECVVLKYEKDAFKREHLAEVT

SEQ ID NO: 1044 - protein, 101 aa, Artificial Sequence
  CD80 v161 IgV
VIHVTKEVKEVATLSCGYNVSVEELAQTRIYWQKEKKMVLTMMSGDINIWPEYKNRIIFDITNNLSIVILGLRPSDEGTYECVVLKYEKDAFKREHLAEVT

SEQ ID NO: 1045 - protein, 101 aa, Artificial Sequence
  CD80 v162 IgV
VIHVTKEVKEVATLSCGHNISVEELAQTRIYWQKEKKMVLTMMSGDVNIWPEYKNRIIFDITNNLSIVILALRPSDEGTYECVILKYEKDAFKREHLAEVT

SEQ ID NO: 1046 - protein, 101 aa, Artificial Sequence
  CD80 v163 IgV
VIHVTKEVKEVATLSCGHNISVEELAQTRIYWQKEKKMVLTMMSGDVNIWPEYKNRTIFDITNNLSIVILDLRPSDEGTYECVVLKYEKDAFKREHLAEVT

SEQ ID NO: 1047 - protein, 101 aa, Artificial Sequence
  CD80 v164 IgV
VIHVTKEVKEVATLSCGHNVSVEELAQTRIYWQKEKKMVLTMMSGDMNIWPEYKNRTIFDITNNLSIVILDVRPSDEGTYECVVLKYEKDAFKRKHLAEVT

SEQ ID NO: 1048 - protein, 101 aa, Artificial Sequence
  CD80 v165 IgV
VIHVTKEVKEVATLSCGHNVSLEELAQTRIYWQKGKKMVLTMMSGDMNIWPEYKNRTIFDITNNLSIVILDPRPSDEGTYECVVLKYEKDAFKREHLAEVT

SEQ ID NO: 1049 - protein, 101 aa, Artificial Sequence; identical to SEQ ID NO: 1031
  CD80 v166 IgV

SEQ ID NO: 1050 - protein, 101 aa, Artificial Sequence
  CD80 v167 IgV
VIHVTKEVKEVATLSCGHNVSVEELAQTRIYWQKDKKMVLTMMSGDMNIWPEYKNRTIFDITNNLSLVILDLRPSDEGTYECVVLKYEKDAFKREHLAEVT

SEQ ID NO: 1051 - protein, 101 aa, Artificial Sequence
  CD80 v168 IgV
VIHVTKEVKEVATLSCGHNVSVEELAHTRIYWQKGKKMVLTMMSGDMNIWPEYKNRTIFDITNNLSIVILDPRPSDEGIYECVVLKYEKDAFKREHLAEVT

SEQ ID NO: 1052 - protein, 101 aa, Artificial Sequence
  CD80 v169 IgV
VIHVTKEVKEVARLSCGHNVSVEELAQTRIYWQKEKKMVLTVMSGDINIWPEYKNRTIFDITNNLSIVILDLRPSDEGTYECVVLKYEKDAFKREHLAEVT

SEQ ID NO: 1053 - protein, 101 aa, Artificial Sequence
  CD80 v170 IgV
VIHVTKEVKEVATLSCGHNVSVEELAQTRIYWQKDKKMVLTMMSGDMNIWPEYKNRTIFDITNNLSIVILALRPSDEGTYECVVLKYEKDAFKREHLAEVT

SEQ ID NO: 1054 - protein, 101 aa, Artificial Sequence
  CD80 v171 IgV
VIHVTKEVKEVATLSCGHNVSVEELAQTRIYWQKDKKMVLTMMSGDINIWPEYKNRTIFDITNNLSIVIMALRPSDEGTYECVVLKYEKDAFKREHLAEVT

SEQ ID NO: 1055 - protein, 101 aa, Artificial Sequence
  CD80 v172 IgV
VIHVTKEVKEVATLSCGHNVSVEELAQTRIYWQKDKKMVLTMMSGDMNIWPEYKNRTIFDITNNLSIVILDVRPSDEGTYECVVLKYEKDAFKREHLAEVT

SEQ ID NO: 1056 - protein, 101 aa, Artificial Sequence
  CD80 v173 IgV
VIHVTKEVKEVATLSCGHNVSVEELAQTRIYWQKDKKMVLTMLSGDMNIWPEYKNRTIFDITNNLSIVIMALRPSDEGTYECVVLKYEKDAFKREHLAEVT

SEQ ID NO: 1057 - protein, 101 aa, Artificial Sequence
  CD80 v174 IgV
VIHVTKEVKEVATLSCGHNVSVEELPQTRIYWQKDKKMVLTMISGDMNIWPEYKNRTIFDITNNLSIVILALRPSDEGTYECVVQKYDKDAFKREHLAEVT

SEQ ID NO: 1058 - protein, 101 aa, Artificial Sequence
  CD80 v175 IgV
VIHVTKEVKEVATLSCGHNVSVEELAQTRIYWQKDKKMVLTMMSGVMNIWPEYKNRTIFDITNNLSIVILALRPSDEGTYECVVQKYEKDAFKREHLAEVT

SEQ ID NO: 1059 - protein, 101 aa, Artificial Sequence
  CD80 v176 IgV
VIHVTKEVKEVATLSCGHNVSVEELALTRIYWQKDKKMVLTMMSGDINIWPEYKNRIIFDITNNLSIVIQALRPSDEGTYECVVLKYDKDAFKREHLAEVT

SEQ ID NO: 1060 - protein, 101 aa, Artificial Sequence
  CD80 v177 IgV
VIHVTKEVKEVATLSCGHNVSVEELAQTRIYWQKEKKMVLTMMSGDVNIWPEYKNRTIFDITNNLSIVFLDLRPSDEGTYECIVLKYEKDAFKREHLAEVT

SEQ ID NO: 1061 - protein, 101 aa, Artificial Sequence
  CD80 v178 IgV
VIHVTKEVKEVATLSCGHNVSVEELAQTRIYWQKDKKMVLTMMSGDMNIWPEYKNRAIFDITNNLSIVILDLRPSDEGTYECVVQKYEKDAFKREHLAEVT

SEQ ID NO: 1062 - protein, 101 aa, Artificial Sequence
  CD80 v179 IgV
VIHVTKEVKEVATLSCGYNVSVEELTQTRIYWQKDKKMVLTMMSGDMNIWPEYKNRTIFDITNNLSIVILDLRPSDEGTYECVVQKYEKDAFKREHLAEVT

SEQ ID NO: 1063 - protein, 101 aa, Artificial Sequence
  CD80 v180 IgV
VIHVTKEVKEVATLSCGHNVSVEELAQTRIYWQKDKKMVLTMMSGDLNIWPEYKNRTIFDITNNLSIVILALRPSDEGTYECVVLKYEKDAFKREHLAEVT

SEQ ID NO: 1064 - protein, 101 aa, Artificial Sequence
  CD80 v181 IgV
VIHVTKEVKEVATLSCGHNVSVDELAQTRIYWQKEKKMVLTVISGDMNIWPEYKNRTVFDITNNLSIVIRALRPSDEGTYECVVLKYEKDAFKREHLAEVT

SEQ ID NO: 1065 - protein, 101 aa, Artificial Sequence
  CD80 v182 IgV
VIHVTKEVKEVATLSCGHNVSVEELAQTRIYWQKEKKMVLTMMSGDMNIWPEYKNRTIFDITNNLSIMIMDLRPSDEGTYECVVLKYEKDAFKRKHLAEVT

SEQ ID NO: 1066 - protein, 101 aa, Artificial Sequence
  CD80 v183 IgV
VIHVTKEVKEVATLSCGHNVSVEELAQTRIYWQKEKKMVLTMMSGDMNIWPEYKIRIIFDITNNLSIVFLALRPSDEGTYECVVLKYEKDAFKREHLAEVT

SEQ ID NO: 1067 - protein, 101 aa, Artificial Sequence
  CD80 v184 IgV
VIHVTKEVKEVATLSCGHNVSVEELAQTRIYWQKDKKMVLTMISGDMNIWPEYKNRTIFDITNNLSIVILDLRPSDEGTYECVVLKYEKDAFKREHLAEVT

SEQ ID NO: 1068 - protein, 101 aa, Artificial Sequence
  CD80 v185 IgV
VIHVTKEVKEVATLSCGHNVSVEELAQTRIYWQKEKKMVLSMMSGDMNIWPEYKNRIIFDITNNLSIVIRALRPSDEGTYECVVLKYEKDAFKREHLAEVT

SEQ ID NO: 1069 - protein, 101 aa, Artificial Sequence
  CD80 v186 IgV
VIHVTKEVKEVATLSCGYNVSVEELAQTRIYWQKEKKMVLTMMSGDMNIWPEYKNRTIFDITNNLSIVILDPRPSDEGTYECVVLKYVKDAFKREHLAEVT

SEQ ID NO: 1070 - protein, 101 aa, Artificial Sequence
  CD80 v187 IgV
VIHVTKEVKEVATLSCGHNISVEELAQTRIYWQKEKKMVLTMMSGDMNIWPEYKNRTIFDITNNLSIVILDLRPSDEGTYECVVLKYEKDAFKREHLAEVT

SEQ ID NO: 1071 - protein, 101 aa, Artificial Sequence
  CD80 v188 IgV
VIHVTKEVKEVATLSCGHNVSVGELSQTRIYWQKDKKMVLTMMSGDMNIWPEYKNRTIFDINNNLSIVILDVRPSDEGTYECVVMKYEKDAFKREHLAEVT

SEQ ID NO: 1072 - protein, 101 aa, Artificial Sequence
  CD80 v189 IgV
VIHVTKEVKEVTTLSCGHNVSVEDLAQTRIYWQKDKKMVLTMMSGVMNIWPEYKNRTIFDVTNNLSIVILAPRPSDEGTYECVVLKYEKDAFKRVHLAEVT

SEQ ID NO: 1073 - protein, 101 aa, Artificial Sequence
  CD80 v190 IgV
VIHVTKEVKEVATLSCGHNVSLEELAQTRIYWQKDKKMVLTMLSGDMNIWPEYKNRTIFDITNNLSIVILGLRPSHEGTYECVVLKYEKDAFKREHLAEVT

SEQ ID NO: 1074 - protein, 101 aa, Artificial Sequence
  CD80 v191 IgV
VIHVTKEVKEVATLSCGHNVSVEELAQTRIYWQKGKKMVLTMMSGDMNIWPEYENRTIFDITNNLSIVILDPRPSDEGTYECVVLKYEKDAFKREHLAEVT

SEQ ID NO: 1075 - protein, 101 aa, Artificial Sequence
  CD80 v192 IgV
VIHVTKEVKEVATLSCGHNVSVEELAQTRIYWQKEKKMVLTMMSGDMNIWPEYKNRTIFDITNNLSIVIQDLRPSDEGTYECVVLKYEKDAFKREHLAEVT

SEQ ID NO: 1076 - protein, 101 aa, Artificial Sequence
  CD80 v193 IgV
VIHVTKEVKEVATLSCGHNVSVEELEQTRIYWQKDKKMVLTMMSGDLNIWPEYKNRTIFDITNNLSIVILALRPSDEGTYECVVQKYEKDAFKREHLAEVT

SEQ ID NO: 1077 - protein, 101 aa, Artificial Sequence
  CD80 v194 IgV
VIHVTKEVKEVATLSCGHNVSVEELAQTRIYWQKEKKMVLTMMSGEMNIWPEYKNRTIFDITNNLSIVILDLRPSDEGTYECVVLKYEKDAFKREHLAEVT

SEQ ID NO: 1078 - protein, 101 aa, Artificial Sequence
  CD80 v195 IgV
VIHVTKEVKEVATLSCGHNVSVEELAQTRIHWQKDKKMVLSMMSGDMNIWPEYKNRTIFDITNNLSILILALRPSDEGTYECVVLKYEKDAFRWEHLAEVT

SEQ ID NO: 1079 - protein, 107 aa, Artificial Sequence
  CD80 WT IgV
VIHVTKEVKEVATLSCGHNVSVEELAQTRIYWQKEKKMVLTMMSGDMNIWPEYKNRTIFDITNNLSIVIQALRPSDEGTYECVVLKYEKDGFKREHLAEVTLSVKAD

SEQ ID NO: 1080 - protein, 107 aa, Artificial Sequence
  CD80 v122 IgV
VIHVTKEVKEVATLSCGHNVSVEELAQTRIYWQKEKKMVLTMMSGDMNIWPEYKNRTIFDITNNLSIVIPALRPSDEGTYECVVLKYEKDAFKREHLAEVTLSVKAD

SEQ ID NO: 1081 - protein, 107 aa, Artificial Sequence
  CD80 v123 IgV
VIHVTKEVKEVATLSCGHNVSVEELAQTRFYWQKEKKMVLTMMSGDMNIWPEYKNRTIFDITNNLSIVIPALRPSDEGTYECVVLKYEKDAFKREHLAEVTLSVKAD

SEQ ID NO: 1082 - protein, 107 aa, Artificial Sequence
  CD80 v124 IgV
VIHVTKEVKEVATLSCGHNVSVEELAHTRIYWQKEKKMVLSMMSGDMNIWPEYKNRTIFDITNNLSIVILDLRPSDEGTYECVVLKYEKDAFKREHLAEVTLSVKAD

SEQ ID NO: 1083 - protein, 107 aa, Artificial Sequence
  CD80 v125 IgV
VIHVTKEVKEVATLSCGHNVSVEELAQTRTYWQKEKKMVLTMMSGDMNIWPEYKNRTIFDITNNLSIVIRALRPSDEGTYECVVLKYEKDAFKREHLAEVTLSVKAD

SEQ ID NO: 1084 - protein, 107 aa, Artificial Sequence
  CD80 v126 IgV
VIHVTKEVKEVARLSRGHNVSVEELAQTRIYWQKEKKMVLTMMSGDMNIWPEYKNRTIFDITNNLSIVIQDLRPSDEGTYECVVLKYEKDAFKREHLAEVTLSVKAD

SEQ ID NO: 1085 - protein, 107 aa, Artificial Sequence
  CD80 v127 IgV
VIHVTKEVKEVATLSCGHNVSVEELAQTRIYWQKEKKMVLTMMSGDMNIWPEYKNRIIFDITNNLSIVILALRPSDEGTYECVVLKYEKDAFKREHLAEVTLSVKAD

SEQ ID NO: 1086 - protein, 107 aa, Artificial Sequence
  CD80 v128 IgV
VIHVTKEVKEVATLSCGHNVSVEELAQTRIYWQKEKKMVLTMISGDMNIWPEYKNRTIFDITNNLSIVILALRPSDEGTYERVVLKYEKDAFKREHLAEVTLSVKAD

SEQ ID NO: 1087 - protein, 107 aa, Artificial Sequence
  CD80 v130 IgV
VIHVTKEVKEVATLSCGHNVSLEELAQTRIYWQKEKKVVLTMMSGDTNIWPEYKNRTIFDITNNLSIVILDLRPSDEGTYECVVMKYEKDAFKREHLAEVTLSVKAD

SEQ ID NO: 1088 - protein, 107 aa, Artificial Sequence
  CD80 v131 IgV
VIHVTKEVKEVATLSCGHNVSVEELAQTRVYWQKEKKMVLTMMSGDMNIWPEYKNRIIFDITNNLSIVIPDLRPSDEGTYECVVLKYEKDTFKREHLAEVTLSVKAD

SEQ ID NO: 1089 - protein, 107 aa, Artificial Sequence
  CD80 v132 IgV
VIHVTKEVKEVATLSCGHNVSIEELAQTRIYWQKEKKMVLTMMSGDMNIWPEYKNRTIFDITNNLSIVIMDLRPSDEGTYECVVLKYEKDAFKREHLAEVTLSVKAD

SEQ ID NO: 1090 - protein, 107 aa, Artificial Sequence
  CD80 v133 IgV
VIHVTKEVKEVATLSCGHNVSVEELAQTRIYWQKEKKMVLTMMSGDMNIWPEYKDRTIFDITNNLSIVIPALRPSDGGTYECVVLKYEKDAFKREHLAEVTLSVKAD

SEQ ID NO: 1091 - protein, 107 aa, Artificial Sequence
  CD80 v134 IgV
VIHVTKEVKEVATLSCGHNVSVEELAQTRIYWQKEKKMVLTMMSGDMNIWPEYKNRAIFDITNNLSIVTLALRPSDEGTYECVVLKYEKDAFKREHLAEVTLSVKAD

SEQ ID NO: 1092 - protein, 107 aa, Artificial Sequence
  CD80 v135 IgV
VIHVTKEVKEVATLSCGHNVSVEELAQTRIYWQKEKKMVLTMMSGDMNIWPEYKDRTIFDITNNLSIVILALRPSDEGTYECVVLMYEKDAFKREHLAEVTLSVKAD

SEQ ID NO: 1093 - protein, 107 aa, Artificial Sequence
  CD80 v136 IgV
VIHVTKEVKEVATLSCGHNVSVEELAQTRIYWQKEKKMVLTMMSGDMNIWPEYKNRTIFDITNNLSIVILAPRPSDEGIYECVVLKYEKDAFKREHLAEVTLSVKAD

SEQ ID NO: 1094 - protein, 107 aa, Artificial Sequence
  CD80 v137 IgV
VIHVTKEVKEVATLSCGHNVSVEELAQTRIYWQKEKKMVLTMMSGDMNIWPEYKNRTIFDITNNLSIVIPALRPSDEGTYECVVLKYEKDASKREHLAEVTLSVKAD

SEQ ID NO: 1095 - protein, 107 aa, Artificial Sequence
  CD80 v138 IgV
VIHVTKEVKEVATLSCGHNVSVEELAQTRIYWQKEKKMVLTMMSGDMNIWPEYKNRTIFDITNNLSIVILALRPSDEGPYECVVLKYEKDAFKREHLAEVTLSVKAD

SEQ ID NO: 1096 - protein, 107 aa, Artificial Sequence
  CD80 v139 IgV
VIHVTKEVKEVATLSCGHNVSVEELAQTRIYWQKDKKMVLTMMSGDINIWPEYKNRTIFDITNNPSIVILALRPSDEGTYECVVLKYEKNAFKREHLAEVTLSVKAD

SEQ ID NO: 1097 - protein, 107 aa, Artificial Sequence
  CD80 v140 IgV
VIHVTKEVKEVATLSCGHNVSVEESAQTRIYWQKDKKMVLTMMSGDINIWPEYKNRTIFDITNNLSIVILALRPSDEGTYECVVLKYEKNAFKREHLAEVTLSVKAD

SEQ ID NO: 1098 - protein, 107 aa, Artificial Sequence
  CD80 v141 IgV
VIHVTKEVKEVATLSCGHNVSVEELAQTRIYWQKEKKMVLTMMPGDMNIWPEYKNRTIFDITNNLSTVILALRSSDEGTYGCVVLKYEKDAFKRDHLAEVTLSVKAD

SEQ ID NO: 1099 - protein, 107 aa, Artificial Sequence
  CD80 v142 IgV
VIHVTKEVKEVATLSCGHNVSVEELAQTRIYWQKEKKMVLTMMSGDMNIWPEYKNRTIFDITNNLSIVILDLRPSDEGTYECVVLKYEKDAFKREHLAEVTLSVKAD

SEQ ID NO: 1100 - protein, 107 aa, Artificial Sequence
  CD80 v143 IgV
VIHVTKEVKEVAALSCGHNVSVEELAQTRIYWQKEKKMVLTMMSGDMNIWPEYKNRTIFDNTNNLSIVILDLRPSDEGTYECVVLKYEKDAFKREHLAEVTLSVKAD

SEQ ID NO: 1101 - protein, 107 aa, Artificial Sequence
  CD80 v144 IgV
VIHVTKEVKEVATLSCGHNVSVEELAQTRIYWQKEKKMVLTMMSGDMNIWPEYKNRTIFDITNNLSIVILALRPSDEGTYKCVVLKYEKDSFKREHLAEVTLSVKAD

SEQ ID NO: 1102 - protein, 107 aa, Artificial Sequence
  CD80 v145 IgV
VIHVTKEVKEVVTLSCGHNVSVEELAQTRIYWQKEKKMVLTMMSGDVNIWPEYKNRTIFDITNNLSIVIMALRPSDEGTYECVVLKYEKDAFKREHLAEVTLSVKAD

SEQ ID NO: 1103 - protein, 107 aa, Artificial Sequence
  CD80 v146 IgV
VIHVTKEVKEVATLSCGHNVSVEELAQTRIYWQEEKKMVLAMMSGDMNIWPEYKNRTIFDITNNLSIVILAVRPSDEGTYECVVLKYEKDAFKREHLAEVTLSVKAD

SEQ ID NO: 1104 - protein, 107 aa, Artificial Sequence
  CD80 v147 IgV
VIHVTKEVKEVATLSCGHNVSVEELAQTRIYWQKEKKMVLSMMSGDMNIWPEYKNRTIFDITNNLSIVILDLRPSDEGTYECVALKYEKDAFKREHLAEVTLSVKAD

SEQ ID NO: 1105 - protein, 107 aa, Artificial Sequence
  CD80 v148 IgV
VIHVTKEVKEVATLSCGHNVSVEELAQTRIYWQKDKKMVLTMMSGDMNIWPEYKNRTIFDITNNLSIVILDLRPSDEGTYECVVLKYEKDAFKREHLAEVTLSVKAD

SEQ ID NO: 1106 - protein, 107 aa, Artificial Sequence
  CD80 v149 IgV
VIHVTKEVKEVATLSCGHNVSVEELAQTRIYWQKDKKMVLTMMSGDINIWPEYKNRTIFDITNNLSIVILALRPSDEGTYECVVLKYEKDAFKREHLAEVTLSVKAD

SEQ ID NO: 1107 - protein, 107 aa, Artificial Sequence
  CD80 v150 IgV
VIHVTKEVKEVATLSCGHNVSVEELAQTRIYWQKERKMVLTMMSGDMNIWPEYKNRTIFDITNNLSIVILALRPSDEATYECVVLKYEKDAFKREHLAEVTLSVKAD

SEQ ID NO: 1108 - protein, 107 aa, Artificial Sequence
  CD80 v151 IgV
VIHVTKEVKEVATLSCGHNVSVEELAQTRIYWEKEKKMVLAMMSGDMNIWPEYKNRTIFDITNNLSIVILALRPSDEGTYECVVLKYEKDAFKREHLAEVTLSVKAD

SEQ ID NO: 1109 - protein, 107 aa, Artificial Sequence
  CD80 v152 IgV
VIHVTKEVKEVATLSCGHNVSVEELAQTRIYWQKEKKMVLTMMSGDVHIWPEYKNRTIFDITNNLSIVILALRPSDEGTYECVVLKYEKDAFKREHLAEVTLSVKAD

SEQ ID NO: 1110 - protein, 107 aa, Artificial Sequence
  CD80 v153 IgV
VIHVTKEVKEVATLSCGHNVSVEELAQTRIYWQKEKKMVLTMMSGDLNIWPEYKNRTIFDITNNLSIAILALRPSDEGTYECVVLKYEKDAFKREHLAEVTLSVKAD

SEQ ID NO: 1111 - protein, 107 aa, Artificial Sequence
  CD80 v154 IgV
VIHVTKEVKEVATLSCGHNVSVEELAQTRIYWQKEKKMVLTMMPGDMNIWPEYKNRTIFDITNNLSIVILDLRPSDEGTYECVVLKYEKDAFKREHLAEVTLSVKAD

SEQ ID NO: 1112 - protein, 107 aa, Artificial Sequence
  CD80 v155 IgV
VIHVTKEVKEVATLSCGHNVSVEELAHTRIYWQKEKKMVLTMISGDMNIWPEYKNRTIFDITNNLSIVILDLSPSDEGTYECVVLKYEKDAFKREHLAEVTLSVKAD

SEQ ID NO: 1113 - protein, 107 aa, Artificial Sequence
  CD80 v156 IgV
  VARIANT (24)..(24): Xaa is unknown
VIHVTKEVKEVATLSCGHNVSVEXLAQTRIYWRKEKKMVLTMMSGDMNIWPEYNNRIIFDITNNLSVVILDLRPSDEGTYECVVLKYEKDAFKREHLAEVTLSVKAD

SEQ ID NO: 1114 - protein, 107 aa, Artificial Sequence
  CD80 v157 IgV
VIHVTKEVKEVATLSCGHNVSVEELAQTRIYWQKDKKMVLTMMSGDMNIWPEYKNRIIFDITNNLSIVIQDLRPSDEGTYECVVLKYEKDAFKREHLAEVTLSVKAD

SEQ ID NO: 1115 - protein, 107 aa, Artificial Sequence
  CD80 v158 IgV
VIHVTKEVKEVATLSCGHNVSVEELAQTRIYWQKEKKMVLTMMSGDINIWPEYKNRTIFDITNNLSIVILALRPSDEGTYECVVLKYDKDAFKREHLAEVTLSVKAD

SEQ ID NO: 1116 - protein, 107 aa, Artificial Sequence
  CD80 v159 IgV
VIHVTKEVKEVATLSCGHNVSVEELAQTRIYWQKEKKMVLTIMSGDMNIWPEYKNRTIFDVTNNLSIVILDLRPSDEGTYECVVLKYEKDAFKREHLAEVTLSVKAD

SEQ ID NO: 1117 - protein, 107 aa, Artificial Sequence
  CD80 v160 IgV
VIHVTKEVKEVATLSCGHNVSVEELAQTRIYWQKEKKMVLTMMSGDMNIWAEYKNRTIFDITNNLSIVILDLRPSDEGTYECVVLKYEKDAFKREHLAEVTLSVKAD

SEQ ID NO: 1118 - protein, 107 aa, Artificial Sequence
  CD80 v161 IgV
VIHVTKEVKEVATLSCGYNVSVEELAQTRIYWQKEKKMVLTMMSGDINIWPEYKNRIIFDITNNLSIVILGLRPSDEGTYECVVLKYEKDAFKREHLAEVTLSVKAD

SEQ ID NO: 1119 - protein, 107 aa, Artificial Sequence
  CD80 v162 IgV
VIHVTKEVKEVATLSCGHNISVEELAQTRIYWQKEKKMVLTMMSGDVNIWPEYKNRIIFDITNNLSIVILALRPSDEGTYECVILKYEKDAFKREHLAEVTLSVKAD

SEQ ID NO: 1120 - protein, 107 aa, Artificial Sequence
  CD80 v163 IgV
VIHVTKEVKEVATLSCGHNISVEELAQTRIYWQKEKKMVLTMMSGDVNIWPEYKNRTIFDITNNLSIVILDLRPSDEGTYECVVLKYEKDAFKREHLAEVTLSVKAD

SEQ ID NO: 1121 - protein, 107 aa, Artificial Sequence
  CD80 v164 IgV
VIHVTKEVKEVATLSCGHNVSVEELAQTRIYWQKEKKMVLTMMSGDMNIWPEYKNRTIFDITNNLSIVILDVRPSDEGTYECVVLKYEKDAFKRKHLAEVTLSVKAD

SEQ ID NO: 1122 - protein, 107 aa, Artificial Sequence
  CD80 v165 IgV
VIHVTKEVKEVATLSCGHNVSLEELAQTRIYWQKGKKMVLTMMSGDMNIWPEYKNRTIFDITNNLSIVILDPRPSDEGTYECVVLKYEKDAFKREHLAEVTLSVKAD

SEQ ID NO: 1123 - protein, 107 aa, Artificial Sequence; identical to SEQ ID NO: 1105
  CD80 v166 IgV

SEQ ID NO: 1124 - protein, 107 aa, Artificial Sequence
  CD80 v167 IgV
VIHVTKEVKEVATLSCGHNVSVEELAQTRIYWQKDKKMVLTMMSGDMNIWPEYKNRTIFDITNNLSLVILDLRPSDEGTYECVVLKYEKDAFKREHLAEVTLSVKAD

SEQ ID NO: 1125 - protein, 107 aa, Artificial Sequence
  CD80 v168 IgV
VIHVTKEVKEVATLSCGHNVSVEELAHTRIYWQKGKKMVLTMMSGDMNIWPEYKNRTIFDITNNLSIVILDPRPSDEGIYECVVLKYEKDAFKREHLAEVTLSVKAD

SEQ ID NO: 1126 - protein, 107 aa, Artificial Sequence
  CD80 v169 IgV
VIHVTKEVKEVARLSCGHNVSVEELAQTRIYWQKEKKMVLTVMSGDINIWPEYKNRTIFDITNNLSIVILDLRPSDEGTYECVVLKYEKDAFKREHLAEVTLSVKAD

SEQ ID NO: 1127 - protein, 107 aa, Artificial Sequence
  CD80 v170 IgV
VIHVTKEVKEVATLSCGHNVSVEELAQTRIYWQKDKKMVLTMMSGDMNIWPEYKNRTIFDITNNLSIVILALRPSDEGTYECVVLKYEKDAFKREHLAEVTLSVKAD

SEQ ID NO: 1128 - protein, 107 aa, Artificial Sequence
  CD80 v171 IgV
VIHVTKEVKEVATLSCGHNVSVEELAQTRIYWQKDKKMVLTMMSGDINIWPEYKNRTIFDITNNLSIVIMALRPSDEGTYECVVLKYEKDAFKREHLAEVTLSVKAD

SEQ ID NO: 1129 - protein, 107 aa, Artificial Sequence
  CD80 v172 IgV
VIHVTKEVKEVATLSCGHNVSVEELAQTRIYWQKDKKMVLTMMSGDMNIWPEYKNRTIFDITNNLSIVILDVRPSDEGTYECVVLKYEKDAFKREHLAEVTLSVKAD

SEQ ID NO: 1130 - protein, 107 aa, Artificial Sequence
  CD80 v173 IgV
VIHVTKEVKEVATLSCGHNVSVEELAQTRIYWQKDKKMVLTMLSGDMNIWPEYKNRTIFDITNNLSIVIMALRPSDEGTYECVVLKYEKDAFKREHLAEVTLSVKAD

SEQ ID NO: 1131 - protein, 107 aa, Artificial Sequence
  CD80 v174 IgV
VIHVTKEVKEVATLSCGHNVSVEELPQTRIYWQKDKKMVLTMISGDMNIWPEYKNRTIFDITNNLSIVILALRPSDEGTYECVVQKYDKDAFKREHLAEVTLSVKAD

SEQ ID NO: 1132 - protein, 107 aa, Artificial Sequence
  CD80 v175 IgV
VIHVTKEVKEVATLSCGHNVSVEELAQTRIYWQKDKKMVLTMMSGVMNIWPEYKNRTIFDITNNLSIVILALRPSDEGTYECVVQKYEKDAFKREHLAEVTLSVKAD

SEQ ID NO: 1133 - protein, 107 aa, Artificial Sequence
  CD80 v176 IgV
VIHVTKEVKEVATLSCGHNVSVEELALTRIYWQKDKKMVLTMMSGDINIWPEYKNRIIFDITNNLSIVIQALRPSDEGTYECVVLKYDKDAFKREHLAEVTLSVKAD

SEQ ID NO: 1134 - protein, 107 aa, Artificial Sequence
  CD80 v177 IgV
VIHVTKEVKEVATLSCGHNVSVEELAQTRIYWQKEKKMVLTMMSGDVNIWPEYKNRTIFDITNNLSIVFLDLRPSDEGTYECIVLKYEKDAFKREHLAEVTLSVKAD

SEQ ID NO: 1135 - protein, 107 aa, Artificial Sequence
  CD80 v178 IgV
VIHVTKEVKEVATLSCGHNVSVEELAQTRIYWQKDKKMVLTMMSGDMNIWPEYKNRAIFDITNNLSIVILDLRPSDEGTYECVVQKYEKDAFKREHLAEVTLSVKAD

SEQ ID NO: 1136 - protein, 107 aa, Artificial Sequence
  CD80 v179 IgV
VIHVTKEVKEVATLSCGYNVSVEELTQTRIYWQKDKKMVLTMMSGDMNIWPEYKNRTIFDITNNLSIVILDLRPSDEGTYECVVQKYEKDAFKREHLAEVTLSVKAD

SEQ ID NO: 1137 - protein, 107 aa, Artificial Sequence
  CD80 v180 IgV
VIHVTKEVKEVATLSCGHNVSVEELAQTRIYWQKDKKMVLTMMSGDLNIWPEYKNRTIFDITNNLSIVILALRPSDEGTYECVVLKYEKDAFKREHLAEVTLSVKAD

SEQ ID NO: 1138 - protein, 107 aa, Artificial Sequence
  CD80 v181 IgV
VIHVTKEVKEVATLSCGHNVSVDELAQTRIYWQKEKKMVLTVISGDMNIWPEYKNRTVFDITNNLSIVIRALRPSDEGTYECVVLKYEKDAFKREHLAEVTLSVKAD

SEQ ID NO: 1139 - protein, 107 aa, Artificial Sequence
  CD80 v182 IgV
VIHVTKEVKEVATLSCGHNVSVEELAQTRIYWQKEKKMVLTMMSGDMNIWPEYKNRTIFDITNNLSIMIMDLRPSDEGTYECVVLKYEKDAFKRKHLAEVTLSVKAD

SEQ ID NO: 1140 - protein, 107 aa, Artificial Sequence
  CD80 v183 IgV
VIHVTKEVKEVATLSCGHNVSVEELAQTRIYWQKEKKMVLTMMSGDMNIWPEYKIRIIFDITNNLSIVFLALRPSDEGTYECVVLKYEKDAFKREHLAEVTLSVKAD

SEQ ID NO: 1141 - protein, 107 aa, Artificial Sequence
  CD80 v184 IgV
VIHVTKEVKEVATLSCGHNVSVEELAQTRIYWQKDKKMVLTMISGDMNIWPEYKNRTIFDITNNLSIVILDLRPSDEGTYECVVLKYEKDAFKREHLAEVTLSVKAD

SEQ ID NO: 1142 - protein, 107 aa, Artificial Sequence
  CD80 v185 IgV
VIHVTKEVKEVATLSCGHNVSVEELAQTRIYWQKEKKMVLSMMSGDMNIWPEYKNRIIFDITNNLSIVIRALRPSDEGTYECVVLKYEKDAFKREHLAEVTLSVKAD

SEQ ID NO: 1143 - protein, 107 aa, Artificial Sequence
  CD80 v186 IgV
VIHVTKEVKEVATLSCGYNVSVEELAQTRIYWQKEKKMVLTMMSGDMNIWPEYKNRTIFDITNNLSIVILDPRPSDEGTYECVVLKYVKDAFKREHLAEVTLSVKAD

SEQ ID NO: 1144 - protein, 107 aa, Artificial Sequence
  CD80 v187 IgV
VIHVTKEVKEVATLSCGHNISVEELAQTRIYWQKEKKMVLTMMSGDMNIWPEYKNRTIFDITNNLSIVILDLRPSDEGTYECVVLKYEKDAFKREHLAEVTLSVKAD

SEQ ID NO: 1145 - protein, 107 aa, Artificial Sequence
  CD80 v188 IgV
VIHVTKEVKEVATLSCGHNVSVGELSQTRIYWQKDKKMVLTMMSGDMNIWPEYKNRTIFDINNNLSIVILDVRPSDEGTYECVVMKYEKDAFKREHLAEVTLSVKAD

SEQ ID NO: 1146 - protein, 107 aa, Artificial Sequence
  CD80 v189 IgV
VIHVTKEVKEVTTLSCGHNVSVEDLAQTRIYWQKDKKMVLTMMSGVMNIWPEYKNRTIFDVTNNLSIVILAPRPSDEGTYECVVLKYEKDAFKRVHLAEVTLSVKAD

SEQ ID NO: 1147 - protein, 107 aa, Artificial Sequence
  CD80 v190 IgV
VIHVTKEVKEVATLSCGHNVSLEELAQTRIYWQKDKKMVLTMLSGDMNIWPEYKNRTIFDITNNLSIVILGLRPSHEGTYECVVLKYEKDAFKREHLAEVTLSVKAD

SEQ ID NO: 1148 - protein, 107 aa, Artificial Sequence
  CD80 v191 IgV
VIHVTKEVKEVATLSCGHNVSVEELAQTRIYWQKGKKMVLTMMSGDMNIWPEYENRTIFDITNNLSIVILDPRPSDEGTYECVVLKYEKDAFKREHLAEVTLSVKAD

SEQ ID NO: 1149 - protein, 107 aa, Artificial Sequence
  CD80 v192 IgV
VIHVTKEVKEVATLSCGHNVSVEELAQTRIYWQKEKKMVLTMMSGDMNIWPEYKNRTIFDITNNLSIVIQDLRPSDEGTYECVVLKYEKDAFKREHLAEVTLSVKAD

SEQ ID NO: 1150 - protein, 107 aa, Artificial Sequence
  CD80 v193 IgV
VIHVTKEVKEVATLSCGHNVSVEELEQTRIYWQKDKKMVLTMMSGDLNIWPEYKNRTIFDITNNLSIVILALRPSDEGTYECVVQKYEKDAFKREHLAEVTLSVKAD

SEQ ID NO: 1151 - protein, 107 aa, Artificial Sequence
  CD80 v194 IgV
VIHVTKEVKEVATLSCGHNVSVEELAQTRIYWQKEKKMVLTMMSGEMNIWPEYKNRTIFDITNNLSIVILDLRPSDEGTYECVVLKYEKDAFKREHLAEVTLSVKAD

SEQ ID NO: 1152 - protein, 107 aa, Artificial Sequence
  CD80 v195 IgV
VIHVTKEVKEVATLSCGHNVSVEELAQTRIHWQKDKKMVLSMMSGDMNIWPEYKNRTIFDITNNLSILILALRPSDEGTYECVVLKYEKDAFRWEHLAEVTLSVKAD

SEQ ID NO: 1153 - protein, 232 aa, Artificial Sequence
  Knob Fc
EPKSSDKTHTCPPCPAPEAEGAPSVFLFPPKPKDTLMISRTPEVTCVVVDVSHEDPEVKFNWYVDGVEVHNAKTKPREEQYNSTYRVVSVLTVLHQDWLNGKEYKCKVSNKALPAPIEKTISKAKGQPREPQVYTLPPCREEMTKNQVSLWCLVKGFYPSDIAVEWESNGQPENNYKTTPPVLDSDGSFFLYSKLTVDKSRWQQGNVFSCSVMHEALHNHYTQKSLSLSPGK

SEQ ID NO: 1154 - protein, 232 aa, Artificial Sequence
  Hole Fc
EPKSSDKTHTCPPCPAPEAEGAPSVFLFPPKPKDTLMISRTPEVTCVVVDVSHEDPEVKFNWYVDGVEVHNAKTKPREEQYNSTYRVVSVLTVLHQDWLNGKEYKCKVSNKALPAPIEKTISKAKGQPREPQVCTLPPSREEMTKNQVSLSCAVKGFYPSDIAVEWESNGQPENNYKTTPPVLDSDGSFFLVSKLTVDKSRWQQGNVFSCSVMHEALHNHYTQKSLSLSPGK

SEQ ID NO: 1155 - protein, 232 aa, Artificial Sequence
  Stack Fc (homodimeric)
EPKSSDKTHTCPPCPAPEAEGAPSVFLFPPKPKDTLMISRTPEVTCVVVDVSHEDPEVKFNWYVDGVEVHNAKTKPREEQYNSTYRVVSVLTVLHQDWLNGKEYKCKVSNKALPAPIEKTISKAKGQPREPQVYTLPPSRDELTKNQVSLTCLVKGFYPSDIAVEWESNGQPENNYKTTPPVLDSDGSFFLYSKLTVDKSRWQQGNVFSCSVMHEALHNHYTQKSLSLSPGK

SEQ ID NO: 1156 - protein, 8 aa, Artificial Sequence
  Stuffer
HMSSVSAQ

SEQ ID NO: 1157 - protein, 232 aa, Artificial Sequence
  Fc (C5S (C220S), R77C, (R292C),  N82G (N297G), V87C (V302C))
EPKSSDKTHTCPPCPAPELLGGPSVFLFPPKPKDTLMISRTPEVTCVVVDVSHEDPEVKFNWYVDGVEVHNAKTKPCEEQYGSTYRCVSVLTVLHQDWLNGKEYKCKVSNKALPAPIEKTISKAKGQPREPQVYTLPPSREEMTKNQVSLTCLVKGFYPSDIAVEWESNGQPENNYKTTPPVLDSDGSFFLYSKLTVDKSRWQQGNVFSCSVMHEALHNHYTQKSLSLSPGK

SEQ ID NO: 1158 - protein, 232 aa, Artificial Sequence
  Fc with C220S/L234A/L235E/G237A
EPKSSDKTHTCPPCPAPEAEGAPSVFLFPPKPKDTLMISRTPEVTCVVVDVSHEDPEVKFNWYVDGVEVHNAKTKPREEQYNSTYRVVSVLTVLHQDWLNGKEYKCKVSNKALPAPIEKTISKAKGQPREPQVYTLPPSREEMTKNQVSLTCLVKGFYPSDIAVEWESNGQPENNYKTTPPVLDSDGSFFLYSKLTVDKSRWQQGNVFSCSVMHEALHNHYTQKSLSLSPGK

SEQ ID NO: 1159 - protein, 231 aa, Artificial Sequence
  Fc with C220S/E233P/L234V/L235A/G236del/S267K
EPKSSDKTHTCPPCPAPPVAGPSVFLFPPKPKDTLMISRTPEVTCVVVDVKHEDPEVKFNWYVDGVEVHNAKTKPREEQYNSTYRVVSVLTVLHQDWLNGKEYKCKVSNKALPAPIEKTISKAKGQPREPQVYTLPPSREEMTKNQVSLTCLVKGFYPSDIAVEWESNGQPENNYKTTPPVLDSDGSFFLYSKLTVDKSRWQQGNVFSCSVMHEALHNHYTQKSLSLSPGK

SEQ ID NO: 1160 - protein, 431 aa, Artificial Sequence
  antiCD19z chimeric antigen receptor
DIQMTQTTSSLSASLGDRVTISCRASQDISKYLNWYQQKPDGTVKLLIYHTSRLHSGVPSRFSGSGSGTDYSLTISNLEQEDIATYFCQQGNTLPYTFGGGTKLEITGSTSGSGKPGSGEGSTKGEVKLQESGPGLVAPSQSLSVTCTVSGVSLPDYGVSWIRQPPRKGLEWLGVIWGSETTYYNSALKSRLTIIKDNSKSQVFLKMNSLQTDDTAIYYCAKHYYYGGSYAMDYWGQGTSVTVSSAAAKPTTTPAPRPPTPAPTIASQPLSLRPEASRPAAGGAVHTRGLDFASDIYIWAPLAGTCGVLLLSLVITLYCRVKFSRSADAPAYQQGQNQLYNELNLGRREEYDVLDKRRGRDPEMGGKPRRKNPQEGLYNELQKDKMAEAYSEIGMKGERRRGKGHDGLYQGLSTATKDTYDALHMQALPPR

SEQ ID NO: 1161 - protein, 21 aa, Artificial Sequence
  CD8-derived signal sequence
MALPVTALLLPLALLLHAARP

SEQ ID NO: 1162 - protein, 23 aa, Artificial Sequence
  CD8-derived signal sequence
MALPVTALLLPLALLLHAARPGS

SEQ ID NO: 1163 - protein, 245 aa, Artificial Sequence
  anti-CD19 scFv
DIQMTQTTSSLSASLGDRVTISCRASQDISKYLNWYQQKPDGTVKLLIYHTSRLHSGVPSRFSGSGSGTDYSLTISNLEQEDIATYFCQQGNTLPYTFGGGTKLEITGSTSGSGKPGSGEGSTKGEVKLQESGPGLVAPSQSLSVTCTVSGVSLPDYGVSWIRQPPRKGLEWLGVIWGSETTYYNSALKSRLTIIKDNSKSQVFLKMNSLQTDDTAIYYCAKHYYYGGSYAMDYWGQGTSVTVSS

SEQ ID NO: 1164 - protein, 69 aa, Artificial Sequence
  CD8-derived hinge and transmembrane domain
AKPTTTPAPRPPTPAPTIASQPLSLRPEACRPAAGGAVHTRGLDFACDIYIWAPLAGTCGVLLLSLVIT

SEQ ID NO: 1165 - protein, 42 aa, Artificial Sequence
  4-1BB-derived costimulatory domain
KRGRKKLLYIFKQPFMRPVQTTQEEDGCSCRFPEEEEGGCEL

SEQ ID NO: 1166 - protein, 40 aa, Artificial Sequence
  CD28-derived costimulatory domain
SKRSRLLHSDYMNMTPRRPGPTRKHYQPYAPPRDFAAYRS

SEQ ID NO: 1167 - protein, 41 aa, Artificial Sequence
  CD28-derived costimulatory domain
RSKRSRLLHSDYMNMTPRRPGPTRKHYQPYAPPRDFAAYRS

SEQ ID NO: 1168 - protein, 44 aa, Artificial Sequence
  CD28-derived costimulatory domain
FWVRSKRSRLLHSDYMNMTPRRPGPTRKHYQPYAPPRDFAAYRS

SEQ ID NO: 1169 - protein, 20 aa, Artificial Sequence
  T2A protein
SGEGRGSLLTCGDVEENPGP

SEQ ID NO: 1170 - protein, 232 aa, Artificial Sequence
  Blue fluorescent protein
SELIKENMHMKLYMEGTVDNHHFKCTSEGEGKPYEGTQTMRIKVVEGGPLPFAFDILATSFLYGSKTFINHTQGIPDFFKQSFPEGFTWERVTTYEDGGVLTATQDTSLQDGCLIYNVKIRGVNFTSNGPVMQKKTLGWEAFTETLYPADGGLEGRNDMALKLVGGSHLIANIKTTYRSKKPAKNLKMPGVYYVDYRLERIKEANNETYVEQHEVAVARYCDLPSKLGHKLN

SEQ ID NO: 1171 - protein, 472 aa, Artificial Sequence
  2nd Gen CAR
DIQMTQTTSSLSASLGDRVTISCRASQDISKYLNWYQQKPDGTVKLLIYHTSRLHSGVPSRFSGSGSGTDYSLTISNLEQEDIATYFCQQGNTLPYTFGGGTKLEITGSTSGSGKPGSGEGSTKGEVKLQESGPGLVAPSQSLSVTCTVSGVSLPDYGVSWIRQPPRKGLEWLGVIWGSETTYYNSALKSRLTIIKDNSKSQVFLKMNSLQTDDTAIYYCAKHYYYGGSYAMDYWGQGTSVTVSSASAKPTTTPAPRPPTPAPTIASQPLSLRPEACRPAAGGAVHTRGLDFACDIYIWAPLAGTCGVLLLSLVITMHKRGRKKLLYIFKQPFMRPVQTTQEEDGCSCRFPEEEEGGCELRVKFSRSADAPAYQQGQNQLYNELNLGRREEYDVLDKRRGRDPEMGGKPRRKNPQEGLYNELQKDKMAEAYSEIGMKGERRRGKGHDGLYQGLSTATKDTYDALHMQALPPR

SEQ ID NO: 1172 - protein, 497 aa, Artificial Sequence
  2nd Gen CAR
DIQMTQTTSSLSASLGDRVTISCRASQDISKYLNWYQQKPDGTVKLLIYHTSRLHSGVPSRFSGSGSGTDYSLTISNLEQEDIATYFCQQGNTLPYTFGGGTKLEITGSTSGSGKPGSGEGSTKGEVKLQESGPGLVAPSQSLSVTCTVSGVSLPDYGVSWIRQPPRKGLEWLGVIWGSETTYYNSALKSRLTIIKDNSKSQVFLKMNSLQTDDTAIYYCAKHYYYGGSYAMDYWGQGTSVTVSSASAKPTTTPAPRPPTPAPTIASQPLSLRPEACRPAAGGAVHTRGLDFACDIYIWAPLAGTCGVLLLSLVITMHKRGRKKLLYIFKQPFMRPVQTTQEEDGCSCRFPEEEEGGCELRVKFSRSADAPAYQQGQNQLYNELNLGRREEYDVLDKRRGRDPEMGGKPRRKNPQEGLYNELQKDKMAEAYSEIGMKGERRRGKGHDGLYQGLSTATKDTYDALHMQALPPRGGRSGEGRGSLLTCGDVEENPGPSR

SEQ ID NO: 1173 - protein, 471 aa, Artificial Sequence
  2nd Gen CAR with CD28-derived costimulatory domain
DIQMTQTTSSLSASLGDRVTISCRASQDISKYLNWYQQKPDGTVKLLIYHTSRLHSGVPSRFSGSGSGTDYSLTISNLEQEDIATYFCQQGNTLPYTFGGGTKLEITGSTSGSGKPGSGEGSTKGEVKLQESGPGLVAPSQSLSVTCTVSGVSLPDYGVSWIRQPPRKGLEWLGVIWGSETTYYNSALKSRLTIIKDNSKSQVFLKMNSLQTDDTAIYYCAKHYYYGGSYAMDYWGQGTSVTVSSASAKPTTTPAPRPPTPAPTIASQPLSLRPEACRPAAGGAVHTRGLDFACDIYIWAPLAGTCGVLLLSLVITMHRSKRSRLLHSDYMNMTPRRPGPTRKHYQPYAPPRDFAAYRSRVKFSRSADAPAYQQGQNQLYNELNLGRREEYDVLDKRRGRDPEMGGKPRRKNPQEGLYNELQKDKMAEAYSEIGMKGERRRGKGHDGLYQGLSTATKDTYDALHMQALPPR

SEQ ID NO: 1174 - protein, 248 aa, Artificial Sequence
  Anti-CD19 scFv
DIQMTQTTSSLSASLGDRVTISCRASQDISKYLNWYQQKPDGTVKLLIYHTSRLHSGVPSRFSGSGSGTDYSLTISNLEQEDIATYFCQQGNTLPYTFGGGTKLEITGSTSGSGKPGSGEGSTKGEVKLQESGPGLVAPSQSLSVTCTVSGVSLPDYGVSWIRQPPRKGLEWLGVIWGSETTYYNSALKSRLTIIKDNSKSQVFLKMNSLQTDDTAIYYCAKHYYYGGSYAMDYWGQGTSVTVSSAAA

SEQ ID NO: 1175 - DNA, 1356 bp, Artificial Sequence
  antiCD19x8z chimeric antigen receptor nucleotide
atggccttaccagtgaccgccttgctcctgccgctggccttgctgctccacgccgccaggccggacatccagatgacacagactacatcctccctgtctgcctctctgggagacagagtcaccatcagttgcagggcaagtcaggacattagtaaatatttaaattggtatcagcagaaaccagatggaactgttaaactcctgatctaccatacatcaagattacactcaggagtcccatcaaggttcagtggcagtgggtctggaacagattattctctcaccattagcaacctggagcaagaagatattgccacttacttttgccaacagggtaatacgcttccgtacacgttcggaggggggactaagttggaaataacaggctccacctctggatccggcaagcccggatctggcgagggatccaccaagggcgaggtgaaactgcaggagtcaggacctggcctggtggcgccctcacagagcctgtccgtcacatgcactgtctcaggggtctcattacccgactatggtgtaagctggattcgccagcctccacgaaagggtctggagtggctgggagtaatatggggtagtgaaaccacatactataattcagctctcaaatccagactgaccatcatcaaggacaactccaagagccaagttttcttaaaaatgaacagtctgcaaactgatgacacagccatttactactgtgccaaacattattactacggtggtagctatgctatggactactggggtcaaggaacctcagtcaccgtctcctcagcggccgcaaagcccaccacgacgccagcgccgcgaccaccaacaccggcgcccaccatcgcgtcgcagcccctgtccctgcgcccagaggcgagccggccagcggcggggggcgcagtgcacacgagggggctggacttcgccagtgatatctacatctgggcgcccctggccgggacttgtggggtccttctcctgtcactggttatcaccctttactgcagagtgaagttcagcaggagcgcagacgcccccgcgtaccagcagggccagaaccagctctataacgagctcaatctaggacgaagagaggagtacgatgttttggacaagagacgtggccgggaccctgagatggggggaaagccgagaaggaagaaccctcaggaaggcctgtacaatgaactgcagaaagataagatggcggaggcctacagtgagattgggatgaaaggcgagcgccggaggggcaaggggcacgatggcctttaccagggtctcagtacagccaccaaggacacctacgacgcccttcacatgcaggccctgccccctcgc

SEQ ID NO: 1176 - DNA, 63 bp, Artificial Sequence
  T2A Nucleotide
ggcagtggcgagggcagaggaagtctgctaacatgcggtgacgtcgaggagaatcctggccca

SEQ ID NO: 1177 - protein, 21 aa, Artificial Sequence
  T2A Protein
GSGEGRGSLLTCGDVEENPGP

SEQ ID NO: 1178 - protein, 117 aa, Artificial Sequence
  NKp30 v1 ECD
LWVSQPPEIRTLEGSSAFLPCSFNASQGRVAIGSVTWFRDEVVPGKEVRNGTPEFRGRLVPLAPSRFLHDHQAELHIRDVRGHDAGIYVCRVEVLGLGVGTGNGTRLVVEKEHPQLG

SEQ ID NO: 1179 - protein, 117 aa, Artificial Sequence
  NKp30 v2 ECD
LWVSQPPEIRTLEGSSAFLPCSFNASQGRVAIGSVTWFRDEVVPGKEVRNGTPEFRGRLAPLASSRFLHDHQAELHIRDVRGHDASIYVCRVEVLGLGVGTGNGTRLVVEKEHPQLG

SEQ ID NO: 1180 - protein, 117 aa, Artificial Sequence
  NKp30 v3 ECD
LWVSQPPEIRTLEGSSAFLPCSFNASQGRLAIGSVTWFRDEVVPGKEVRNGTPEFRGRLVPLASSRFLHDHQAELHIRDVRGHDASIYVCRVEVLGLGVGTGNGTRLVVEKEHPQLG

SEQ ID NO: 1181 - protein, 117 aa, Artificial Sequence
  NKp30 v4 ECD
LWVSQPPEIRTLEGSSAFLPCSFNASQGRLAIGSVTWFRDEVVPGKEVRNGTPEFRGRLAPLAPSRFLHDHQAELHIRDVRGHDASIYVCRVEVLGLGVGTGNGTRLVVEKEHPQLG

SEQ ID NO: 1182 - protein, 117 aa, Artificial Sequence
  NKp30 v5 ECD
LWVSQPPEIRTLEGSSAFLPCSFNASQGRLAIGSVTWFRDEVVPGKEVRNGTPEFRGRLAPLASSRFLHDHQAELHIRDVRGHDAGIYVCRVEVLGLGVGTGNGTRLVVEKEHPQLG

SEQ ID NO: 1183 - protein, 108 aa, Artificial Sequence
  NKp30 WT IgC-like
LWVSQPPEIRTLEGSSAFLPCSFNASQGRLAIGSVTWFRDEVVPGKEVRNGTPEFRGRLAPLASSRFLHDHQAELHIRDVRGHDASIYVCRVEVLGLGVGTGNGTRLV

SEQ ID NO: 1184 - protein, 108 aa, Artificial Sequence
  NKp30 v1 IgC-like
LWVSQPPEIRTLEGSSAFLPCSFNASQGRVAIGSVTWFRDEVVPGKEVRNGTPEFRGRLVPLAPSRFLHDHQAELHIRDVRGHDAGIYVCRVEVLGLGVGTGNGTRLV

SEQ ID NO: 1185 - protein, 108 aa, Artificial Sequence
  NKp30 v2 IgC-like
LWVSQPPEIRTLEGSSAFLPCSFNASQGRVAIGSVTWFRDEVVPGKEVRNGTPEFRGRLAPLASSRFLHDHQAELHIRDVRGHDASIYVCRVEVLGLGVGTGNGTRLV

SEQ ID NO: 1186 - protein, 108 aa, Artificial Sequence
  NKp30 v3 IgC-like
LWVSQPPEIRTLEGSSAFLPCSFNASQGRLAIGSVTWFRDEVVPGKEVRNGTPEFRGRLVPLASSRFLHDHQAELHIRDVRGHDASIYVCRVEVLGLGVGTGNGTRLV

SEQ ID NO: 1187 - protein, 108 aa, Artificial Sequence
  NKp30 v4 IgC-like
LWVSQPPEIRTLEGSSAFLPCSFNASQGRLAIGSVTWFRDEVVPGKEVRNGTPEFRGRLAPLAPSRFLHDHQAELHIRDVRGHDASIYVCRVEVLGLGVGTGNGTRLV

SEQ ID NO: 1188 - protein, 108 aa, Artificial Sequence
  NKp30 v5 IgC-like
LWVSQPPEIRTLEGSSAFLPCSFNASQGRLAIGSVTWFRDEVVPGKEVRNGTPEFRGRLAPLASSRFLHDHQAELHIRDVRGHDAGIYVCRVEVLGLGVGTGNGTRLV

SEQ ID NO: 1189 - protein, 270 aa, Artificial Sequence
  Nkp30 stack
DTQEKEVRAMVGSDVELSCACPEGSRFDLNDVYVYWQTSESKTVVTYHIPQHSSLEYVDSRYRNRALMSPAGMLRGDFSLRLFNVTPQDEQKFHCLVLSPSLGFQEVLSVEVTLHVAANFSVGGGGSGGGGSGGGGSLWVSQPPEIRTLEGSSAFLPCSFNASQGRVAIGSVTWFRDEVVPGKEVRNGTPEFRGRLVPLAPSRFLHDHQAELHIRDVRGHDAGIYVCRVEVLGLGVGTGNGTRLVVEKEHPQLGGGGGSGGGGSAAAEPK

SEQ ID NO: 1190 - protein, 116 aa, Artificial Sequence
  NKp30 v1 IgC-like (long)
LWVSQPPEIRTLEGSSAFLPCSFNASQGRVAIGSVTWFRDEVVPGKEVRNGTPEFRGRLVPLAPSRFLHDHQAELHIRDVRGHDAGIYVCRVEVLGLGVGTGNGTRLVVEKEHPQL

SEQ ID NO: 1191 - protein, 224 aa, Artificial Sequence
  CD86 v1 ECD
APLKIQAYFNETADLPCQFANSQNQSLSELVVFWHDQENLVLNEVYLGKEKFDSVHSKYMGRTSFDSDSWTLRLHNLQIKDKGLYQCIILHKKPTGMIRIHHMNSELSVLANFSQPEIVPISNITENVYINLTCSSIHGYPEPKKMSVLLRTKNSTIEYDGVMQKSQDNVTELYDVSISLSVSFPDVTSNMTIFCILETDKTRLLSSPFSIELEDPQPPPDHIP

SEQ ID NO: 1192 - protein, 224 aa, Artificial Sequence
  CD86 v2 ECD
APLKIQAYFNETADLPCQFANSQNQSLSELVVFWHDQENLVLNEVYLGKEKFDSVHSKYMGRTSFDSDSWTLRLHNLQIKDKGLYQCIIHHKKPTGMIRIHQMNSELSVLANFSQPEIVPISNITENVYINLTCSSIHGYPEPKKMSVLLRTKNSTIEYDGVMQKSQDNVTELYDVSISLSVSFPDVTSNMTIFCILETDKTRLLSSPFSIELEDPQPPPDHIP

SEQ ID NO: 1193 - protein, 224 aa, Artificial Sequence
  CD86 v3 ECD
APLKIQAYFNETADLPCQFANSQNQSLSELVVFWQDQENLVLNEVYLGKEKFDSVHSKYMGRTSFDSDSWTLRLHNLQIKDKGLYQCIILHKKPTGMIRIHQMNSELSVLANFSQPEIVPISNITENVYINLTCSSIHGYPEPKKMSVLLRTKNSTIEYDGVMQKSQDNVTELYDVSISLSVSFPDVTSNMTIFCILETDKTRLLSSPFSIELEDPQPPPDHIP

SEQ ID NO: 1194 - protein, 224 aa, Artificial Sequence
  CD86 v4 ECD
APLKIQAYFNETADLPCQFANSQNQSLSELVVFWQDQENLVLNEVYLGKEKFDSVHSKYMGRTSFDSDSWTLRLHNLQIKDKGLYQCIIHHKKPTGMIRIHHMNSELSVLANFSQPEIVPISNITENVYINLTCSSIHGYPEPKKMSVLLRTKNSTIEYDGVMQKSQDNVTELYDVSISLSVSFPDVTSNMTIFCILETDKTRLLSSPFSIELEDPQPPPDHIP

SEQ ID NO: 1195 - protein, 108 aa, Artificial Sequence
  CD86 WT IgV
APLKIQAYFNETADLPCQFANSQNQSLSELVVFWQDQENLVLNEVYLGKEKFDSVHSKYMGRTSFDSDSWTLRLHNLQIKDKGLYQCIIHHKKPTGMIRIHQMNSELS

SEQ ID NO: 1196 - protein, 108 aa, Artificial Sequence
  CD86 v1 IgV
APLKIQAYFNETADLPCQFANSQNQSLSELVVFWHDQENLVLNEVYLGKEKFDSVHSKYMGRTSFDSDSWTLRLHNLQIKDKGLYQCIILHKKPTGMIRIHHMNSELS

SEQ ID NO: 1197 - protein, 108 aa, Artificial Sequence
  CD86 v2 IgV
APLKIQAYFNETADLPCQFANSQNQSLSELVVFWHDQENLVLNEVYLGKEKFDSVHSKYMGRTSFDSDSWTLRLHNLQIKDKGLYQCIIHHKKPTGMIRIHQMNSELS

SEQ ID NO: 1198 - protein, 108 aa, Artificial Sequence
  CD86 v3 IgV
APLKIQAYFNETADLPCQFANSQNQSLSELVVFWQDQENLVLNEVYLGKEKFDSVHSKYMGRTSFDSDSWTLRLHNLQIKDKGLYQCIILHKKPTGMIRIHQMNSELS

SEQ ID NO: 1199 - protein, 108 aa, Artificial Sequence
  CD86 v4 IgV
APLKIQAYFNETADLPCQFANSQNQSLSELVVFWQDQENLVLNEVYLGKEKFDSVHSKYMGRTSFDSDSWTLRLHNLQIKDKGLYQCIIHHKKPTGMIRIHHMNSELS

SEQ ID NO: 1200 - protein, 229 aa, artificial sequence
  IgG4 Fc
ESKYGPPCPSCPAPEFLGGPSVFLFPPKPKDTLMISRTPEVTCVVVDVSQEDPEVQFNWYVDGVEVHNAKTKPREEQFNSTYRVVSVLTVLHQDWLNGKEYKCKVSNKGLPSSIEKTISKAKGQPREPQVYTLPPSQEEMTKNQVSLTCLVKGFYPSDIAVEWESNGQPENNYKTTPPVLDSDGSFFLYSRLTVDKSRWQEGNVFSCSVMHEALHNHYTQKSLSLSLGK

SEQ ID NO: 1201 - protein, 229 aa, Artificial Sequence
  IgG4 Fc S228P
ESKYGPPCPPCPAPEFLGGPSVFLFPPKPKDTLMISRTPEVTCVVVDVSQEDPEVQFNWYVDGVEVHNAKTKPREEQFNSTYRVVSVLTVLHQDWLNGKEYKCKVSNKGLPSSIEKTISKAKGQPREPQVYTLPPSQEEMTKNQVSLTCLVKGFYPSDIAVEWESNGQPENNYKTTPPVLDSDGSFFLYSRLTVDKSRWQEGNVFSCSVMHEALHNHYTQKSLSLSLGK

SEQ ID NO: 1202 - protein, 232 aa, artificial Sequence
  IgG1 Fc C220S
EPKSSDKTHTCPPCPAPELLGGPSVFLFPPKPKDTLMISRTPEVTCVVVDVSHEDPEVKFNWYVDGVEVHNAKTKPREEQYNSTYRVVSVLTVLHQDWLNGKEYKCKVSNKALPAPIEKTISKAKGQPREPQVYTLPPSREEMTKNQVSLTCLVKGFYPSDIAVEWESNGQPENNYKTTPPVLDSDGSFFLYSKLTVDKSRWQQGNVFSCSVMHEALHNHYTQKSLSLSPGK

SEQ ID NO: 1203 - protein, 98 aa, Artificial Sequence
  PD-L2 IgV
FTVTVPKELYIIEHGSNVTLECNFDTGSHVNLGAITASLQKVENDTSPHRERATLLEEQLPLGKASFHIPQVQVRDEGQYQCIIIYGVAWDYKYLTLK

SEQ ID NO: 1204 - protein, 201 aa, Artificial Sequence
  PD-L2 ECD v1
LFTVTVPKELYIIEQGSNVTLECNFDTGSHVNLGAITASLQKVENDTSPHRERATLLEEQLPLGKASFHIPQVQVRDEGQYQCIIIYGVAWDYKYLTLKVKASYRKINTHILKVPETDEVELTCQATGYPLAEVSWPNVSVPANTSHSRTPEGLYQVTSVLRLKPPPGRNFSCVFWNTHVRELTLASIDLQSQMEPRTHPT

SEQ ID NO: 1205 - protein, 201 aa, Artificial Sequence
  PD-L2 ECD v2
LFTVTVPKELYIIEHGSNVTLECDFDTGSHVNLGAITASLQKVENDTSPHRERATLLEEQLPLGKASFHIPQVQVRDEGQYQCIIIYGVAWDYKYLTLKVKASYRKINTHILKVPETDEVELTCQATGYPLAEVSWPNVSVPANTSHSRTPEGLYQVTSVLRLKPPPGRNFSCVFWNTHVRELTLASIDLQSQMEPRTHPT

SEQ ID NO: 1206 - protein, 201 aa, Artificial Sequence
  PD-L2 ECD v3
LFTVTVPKELYIIEHGSNVTLECNFDTGSHVNLGAITASLQKVDNDTSPHRERATLLEEQLPLGKASFHIPQVQVRDEGQYQCIIIYGVAWDYKYLTLKVKASYRKINTHILKVPETDEVELTCQATGYPLAEVSWPNVSVPANTSHSRTPEGLYQVTSVLRLKPPPGRNFSCVFWNTHVRELTLASIDLQSQMEPRTHPT

SEQ ID NO: 1207 - protein, 201 aa, Artificial Sequence
  PD-L2 ECD v4
LFTVTVPKELYIIEHGSNVTLECNFDTGSHVNLGAITASLQKVENDTSPHRERATLLEEQLPLGKASFHIPQVQVRDEGQYQCIIIYGDAWDYKYLTLKVKASYRKINTHILKVPETDEVELTCQATGYPLAEVSWPNVSVPANTSHSRTPEGLYQVTSVLRLKPPPGRNFSCVFWNTHVRELTLASIDLQSQMEPRTHPT

SEQ ID NO: 1208 - protein, 201 aa, Artificial Sequence
  PD-L2 ECD v5
LFTVTVPKELYIIEHGSNVTLECNFDTGSHVNLGAITASLQKVENDTSPHRERATLLEEQLPLGKASFHIPQVQVRDEGQYRCIIIYGDAWDYKYLTLKVKASYRKINTHILKVPETDEVELTCQATGYPLAEVSWPNVSVPANTSHSRTPEGLYQVTSVLRLKPPPGRNFSCVFWNTHVRELTLASIDLQSQMEPRTHPT

SEQ ID NO: 1209 - protein, 201 aa, Artificial Sequence
  PD-L2 ECD v6
LFTVTVPKELYIIEHGSNVTLECNFDTGSHVNLGAITASLQKVENDTSPHRERATLLEGQLPLGKASFHIPQVQVRDEGQYRCIIIYGVAWDYKYLTLKVKASYRKINTHILKVPETDEVELTCQATGYPLAEVSWPNVSVPANTSHSRTPEGLYQVTSVLRLKPPPGRNFSCVFWNTHVRELTLASIDLQSQMEPRTHPT

SEQ ID NO: 1210 - protein, 201 aa, Artificial Sequence
  PD-L2 ECD v7
LFTVTVPKELYIIEHGSNVTLECNFDTGSHVNLGAITAILQKVENDTSPHRERATLLEEQLPLGKASFHIPQVQVRDEGQYQCIIIYGDAWDYKYLTLKVKASYRKINTHILKVPETDEVELTCQATGYPLAEVSWPNVSVPANTSHSRTPEGLYQVTSVLRLKPPPGRNFSCVFWNTHVRELTLASIDLQSQMEPRTHPT

SEQ ID NO: 1211 - protein, 201 aa, Artificial Sequence
  PD-L2 ECD v8
LFTVTVPKELYIIEHGSNVTLECNFDTGSHVNLGAITASLQKVENDTSPHRERATLLEEQLPLGKALFHIPQVQVRDEGQYQCIIIYGDAWDYKYLTLKVKASYRKINTHILKVPETDEVELTCQATGYPLAEVSWPNVSVPANTSHSRTPEGLYQVTSVLRLKPPPGRNFSCVFWNTHVRELTLASIDLQSQMEPRTHPT

SEQ ID NO: 1212 - protein, 201 aa, Artificial Sequence
  PD-L2 ECD v9
LFTVTVPKELYIIEHGSNVTLECNFDTGSHVNLGAITASLQKVENDTSPHRERATLLEEQLPLGKALFHIPQVQVRDEGQYQCIFIYGVAWDYKYLTLKVKASYRKINTHILKVPETDEVELTCQATGYPLAEVSWPNVSVPANTSHSRTPEGLYQVTSVLRLKPPPGRNFSCVFWNTHVRELTLASIDLQSQMEPRTHPT

SEQ ID NO: 1213 - protein, 201 aa, Artificial Sequence
  PD-L2 ECD v10
LFTVTVPKELYIIEHGSNVTLECNFDTGSHVNLGAITASLQKVENDTSPHRERATLLEEQLPLGKALFHIPQVQVRDEGQYQCIITYGVAWDYKYLTLKVKASYRKINTHILKVPETDEVELTCQATGYPLAEVSWPNVSVPANTSHSRTPEGLYQVTSVLRLKPPPGRNFSCVFWNTHVRELTLASIDLQSQMEPRTHPT

SEQ ID NO: 1214 - protein, 201 aa, Artificial Sequence
  PD-L2 ECD v11
LFTVTVPKELYIIEQGSNVTLECNFDTGSHVNLGAITASLQKVENDTSPHRERATLLEEQLPLGRASFHIPQVQVRDEGQYQCIIIYGVAWDYKYLTLKVKASYRKINTHILKVPETDEVELTCQATGYPLAEVSWPNVSVPANTSHSRTPEGLYQVTSVLRLKPPPGRNFSCVFWNTHVRELTLASIDLQSQMEPRTHPT

SEQ ID NO: 1215 - protein, 201 aa, Artificial Sequence
  PD-L2 ECD v12
LFTVTVPKELYIIEQGSNVTLECNFDTGSHVNLGAITASLQKVENDTSPHRERATLLEEQLPLGKASFHIPHVQVRDEGQYQCIIIYGDAWDYKYLTLKVKASYRKINTHILKVPETDEVELTCQATGYPLAEVSWPNVSVPANTSHSRTPEGLYQVTSVLRLKPPPGRNFSCVFWNTHVRELTLASIDLQSQMEPRTHPT

SEQ ID NO: 1216 - protein, 201 aa, Artificial Sequence
  PD-L2 ECD v13
LFTVTVPKELYIIEQGSNVTLECNFDTGSHVNLGAITASLQKVENDTSPHRERATLLEEQLPLGKALFHIPQVQVGDEGQYQCIIIYGVAWDYKYLTLKVKASYRKINTHILKVPETDEVELTCQATGYPLAEVSWPNVSVPANTSHSRTPEGLYQVTSVLRLKPPPGRNFSCVFWNTHVRELTLASIDLQSQMEPRTHPT

SEQ ID NO: 1217 - protein, 201 aa, Artificial Sequence
  PD-L2 ECD v14
LFTVTVPKELYIIEQGSNVTLECNFDTGSHVNLGAITASLQKVENDTSPHRERATLLEEQLPLGKASFHIPQVQVGDEGQYQCIFIYGVAWDYKYLTLKVKASYRKINTHILKVPETDEVELTCQATGYPLAEVSWPNVSVPANTSHSRTPEGLYQVTSVLRLKPPPGRNFSCVFWNTHVRELTLASIDLQSQMEPRTHPT

SEQ ID NO: 1218 - protein, 201 aa, Artificial Sequence
  PD-L2 ECD v15
LFTVTVPKELYIIEQGSNVTLECNFDTGSHVNLGAITASLQKVENDASPHRERATLLEEQLPLGKASFHIPQVQVRDEGQYRCIIIYGVAWDYKYLTLKVKASYRKINTHILKVPETDEVELTCQATGYPLAEVSWPNVSVPANTSHSRTPEGLYQVTSVLRLKPPPGRNFSCVFWNTHVRELTLASIDLQSQMEPRTHPT

SEQ ID NO: 1219 - protein, 201 aa, Artificial Sequence
  PD-L2 ECD v16
LFTVTVPKELYIIEQGSNVTLECNFDTGSHVNLGAITASLQKVENDTSPHRERATLLEEQLPLGKASFHIPQVQVRDEGQYRCIIIYGDAWDYKYLTLKVKASYRKINTHILKVPETDEVELTCQATGYPLAEVSWPNVSVPANTSHSRTPEGLYQVTSVLRLKPPPGRNFSCVFWNTHVRELTLASIDLQSQMEPRTHPT

SEQ ID NO: 1220 - protein, 201 aa, Artificial Sequence
  PD-L2 ECD v17
LFTVTVPKELYIIEQGSNVTLESNFDTGSHVNLGAITASLQKVENDTSPHRERATLLEEQLPLGKASFHIPQVQVRDEGQYQCIITYGVAWDYKYLTLKVKASYRKINTHILKVPETDEVELTCQATGYPLAEVSWPNVSVPANTSHSRTPEGLYQVTSVLRLKPPPGRNFSCVFWNTHVRELTLASIDLQSQMEPRTHPT

SEQ ID NO: 1221 - protein, 201 aa, Artificial Sequence
  PD-L2 ECD v18
LFTVTVPKELYIIEQGSNVTLECNFDTGSHVNLGAITAILQKVENDTSPHRERATLLEEQLPLGKASFHIPQVQVRDEGQYQCIITYGVAWDYKYLTLKVKASYRKINTHILKVPETDEVELTCQATGYPLAEVSWPNVSVPANTSHSRTPEGLYQVTSVLRLKPPPGRNFSCVFWNTHVRELTLASIDLQSQMEPRTHPT

SEQ ID NO: 1222 - protein, 201 aa, Artificial Sequence; identical to SEQ ID NO: 1217
  PD-L2 ECD v19

SEQ ID NO: 1223 - protein, 201 aa, Artificial Sequence
  PD-L2 ECD v20
LFTVTVPKELYIIEHGSNVTLECNFDTGSHVNLGAITASLQKVDNDTSPHRERATLLEEQLPLGKASFHIPQVQVRDEGQYQCIIIYGDARDYKYLTLKVKASYRKINTHILKVPETDEVELTCQATGYPLAEVSWPNVSVPANTSHSRTPEGLYQVTSVLRLKPPPGRNFSCVFWNTHVRELTLASIDLQSQMEPRTHPT

SEQ ID NO: 1224 - protein, 201 aa, Artificial Sequence
  PD-L2 ECD v21
LFTVTVPKELYIVEHGSNVTLECNFDTGSHVNLGAITASLQKVENDTSPHRERATLLEEQLPLGKALFHIPQVQVRDEGQYQCIIIYGDAWDYKYLTLKVKASYRKINTHILKVPETDEVELTCQATGYPLAEVSWPNVSVPANTSHSRTPEGLYQVTSVLRLKPPPGRNFSCVFWNTHVRELTLASIDLQSQMEPRTHPT

SEQ ID NO: 1225 - protein, 201 aa, Artificial Sequence
  PD-L2 ECD v22
LFTVTVPKELYIIEQGSNVTLECNFDTGSHVNLGAITASLQKVENDTSPHRERATLLEEQLPLGKALFHIPQVQVRDEGQYQCIITYGVAWDYKYLTLKVKASYRKINTHILKVPETDEVELTCQATGYPLAEVSWPNVSVPANTSHSRTPEGLYQVTSVLRLKPPPGRNFSCVFWNTHVRELTLASIDLQSQMEPRTHPT

SEQ ID NO: 1226 - protein, 201 aa, Artificial Sequence
  PD-L2 ECD v23
LFTVTVPKELYIVEQGSNVTLECNFDTGSHVNLGAITASLQKVENDTSPHRERATLLEEQLPLGKALFHIPQVQVRDEGQYQCIITYGVAWDYKYLTLKVKASYRKINTHILKVPETDEVELTCQATGYPLAEVSWPNVSVPANTSHSRTPEGLYQVTSVLRLKPPPGRNFSCVFWNTHVRELTLASIDLQSQMEPRTHPT

SEQ ID NO: 1227 - protein, 201 aa, Artificial Sequence
  PD-L2 ECD v24
LFTVTVPKELYIVEQGSNVTLECNFDTGSHVNLGAITASLQKVDNDTSPHRERATLLEEQLPLGKASFHIPQVQVRDEGQYQCIIIYGDAWDYKYLTLKVKASYRKINTHILKVPETDEVELTCQATGYPLAEVSWPNVSVPANTSHSRTPEGLYQVTSVLRLKPPPGRNFSCVFWNTHVRELTLASIDLQSQMEPRTHPT

SEQ ID NO: 1228 - protein, 201 aa, Artificial Sequence
  PD-L2 ECD v25
LFTVTVPKELYIVEHGSNVTLECNFDTGSHVNLGAITAILQKVDNDTSPHRERATLLEEQLPLGKASFHIPQVQVRDEGQYRCIIIYGDAWDYKYLTLKVKASYRKINTHILKVPETDEVELTCQATGYPLAEVSWPNVSVPANTSHSRTPEGLYQVTSVLRLKPPPGRNFSCVFWNTHVRELTLASIDLQSQMEPRTHPT

SEQ ID NO: 1229 - protein, 201 aa, Artificial Sequence
  PD-L2 ECD v26
LFTVTVPKELYIVEHGSNVTLECNFDTGSHVNLGAITASLQKVDNDTSPHRERATLLEEQLPLGKASFHIPQVQVRDEGQYRCIIIYGDAWDYKYLTLKVKASYRKINTHILKVPETDEVELTCQATGYPLAEVSWPNVSVPANTSHSRTPEGLYQVTSVLRLKPPPGRNFSCVFWNTHVRELTLASIDLQSQMEPRTHPT

SEQ ID NO: 1230 - protein, 201 aa, Artificial Sequence
  PD-L2 ECD v27
LFTVTVPKELYIVEHGSNVTLECNFDTGSHVNLGAITASLQKVENDTSPHRERATLLEEQLPLGKASFHIPHVQVGDEGQYQCIITYGVAWDYKYLTLKVKASYRKINTHILKVPETDEVELTCQATGYPLAEVSWPNVSVPANTSHSRTPEGLYQVTSVLRLKPPPGRNFSCVFWNTHVRELTLASIDLQSQMEPRTHPT

SEQ ID NO: 1231 - protein, 201 aa, Artificial Sequence
  PD-L2 ECD v28
LFTVTVPKELYIVEQGSNVTLECNFDTGSHVNLGAITASLQKVENDTSPHRERATLLEEQLPLGKASFHIPQVQVGDEGQYQCIFIYGVAWDYKYLTLKVKASYRKINTHILKVPETDEVELTCQATGYPLAEVSWPNVSVPANTSHSRTPEGLYQVTSVLRLKPPPGRNFSCVFWNTHVRELTLASIDLQSQMEPRTHPT

SEQ ID NO: 1232 - protein, 201 aa, Artificial Sequence
  PD-L2 ECD v29
LFTVTVPKELYIIEQGSNVTLECNFDTGSHVNLGAITAILQKVENDTSPHRERATLLEEQLPLGKASFHIPQVQVGDEGQYQCIIIYGDAWDYKYLTLKVKASYRKINTHILKVPETDEVELTCQATGYPLAEVSWPNVSVPANTSHSRTPEGLYQVTSVLRLKPPPGRNFSCVFWNTHVRELTLASIDLQSQMEPRTHPT

SEQ ID NO: 1233 - protein, 201 aa, Artificial Sequence
  PD-L2 ECD v30
LFTVTVPKELYIIEQGSNVTLECNFDTGSHVNLGAITASLQKVENDTSPHRERATLLEEQLPLGKALFHIPQVQVGDEGQYQCIFIYGVAWDYKYLTLKVKASYRKINTHILKVPETDEVELTCQATGYPLAEVSWPNVSVPANTSHSRTPEGLYQVTSVLRLKPPPGRNFSCVFWNTHVRELTLASIDLQSQMEPRTHPT

SEQ ID NO: 1234 - protein, 201 aa, Artificial Sequence
  PD-L2 ECD v31
LFTVTVPKELYIIEQGSNVTLECNFDTGSHVNLGAITASLQKVENDASPHRERATLLEEQLPLGKASFHIPHVQVGDEGQYQCIITYGVAWDYKYLTLKVKASYRKINTHILKVPETDEVELTCQATGYPLAEVSWPNVSVPANTSHSRTPEGLYQVTSVLRLKPPPGRNFSCVFWNTHVRELTLASIDLQSQMEPRTHPT

SEQ ID NO: 1235 - protein, 201 aa, Artificial Sequence
  PD-L2 ECD v32
LFTVTVPKELYIIEQGSNVTLECNFDTGSHVNLGAITASLQKVENDASPHRERATLLEEQLPLGKASFHIPHVQVGDEGQYQCIIIYGVAWDYKYLTLKVKASYRKINTHILKVPETDEVELTCQATGYPLAEVSWPNVSVPANTSHSRTPEGLYQVTSVLRLKPPPGRNFSCVFWNTHVRELTLASIDLQSQMEPRTHPT

SEQ ID NO: 1236 - protein, 201 aa, Artificial Sequence
  PD-L2 ECD v33
LFTVTVPKELYIVEQGSNVTLECNFDTGSHVNLGAITASLQKVENDASPHRERATLLEEQLPLGKASFHIPHVQVGDEGQYQCIIIYGVAWDYKYLTLKVKASYRKINTHILKVPETDEVELTCQATGYPLAEVSWPNVSVPANTSHSRTPEGLYQVTSVLRLKPPPGRNFSCVFWNTHVRELTLASIDLQSQMEPRTHPT

SEQ ID NO: 1237 - protein, 201 aa, Artificial Sequence
  PD-L2 ECD v34
LFTVTVPKELYIIEQGSNVTLECNFDTGSHVNLGAITASLQKVDNDTSPHRERATLLEEQLPLGKASFHIPQVQVGDEGQYQCIFIYGVAWDYKYLTLKVKASYRKINTHILKVPETDEVELTCQATGYPLAEVSWPNVSVPANTSHSRTPEGLYQVTSVLRLKPPPGRNFSCVFWNTHVRELTLASIDLQSQMEPRTHPT

SEQ ID NO: 1238 - protein, 201 aa, Artificial Sequence
  PD-L2 ECD v35
LFTVTVPKELYIIEQGSNVTLECNFDTGSHVNLGAITAILQKVENDTSPHRERATLLEEQLPLGKALFHIPQVQVRDEGQYQCIIIYGDAWDYKYLTLKVKASYRKINTHILKVPETDEVELTCQATGYPLAEVSWPNVSVPANTSHSRTPEGLYQVTSVLRLKPPPGRNFSCVFWNTHVRELTLASIDLQSQMEPRTHPT

SEQ ID NO: 1239 - protein, 201 aa, Artificial Sequence
  PD-L2 ECD v36
LFTVTVPKELYIIEQGSNVTLECNFDTGSHVDLGAITASLQKVENDTSPHRERATLLEEQLPLGKALFHIPQVQVRDEGQYQCIIIYGDAWDYKYLTLKVKASYRKINTHILKVPETDEVELTCQATGYPLAEVSWPNVSVPANTSHSRTPEGLYQVTSVLRLKPPPGRNFSCVFWNTHVRELTLASIDLQSQMEPRTHPT

SEQ ID NO: 1240 - protein, 201 aa, Artificial Sequence
  PD-L2 ECD v37
LFTVTVPKELYIIEHGSNVTLECNFDTGSHVDLGAITASLQKVENDTSPHRERATLLEEQLPLGKALFHIPQVQVRDEGQYQCIIIYGDAWDYKYLTLKVKASYRKINTHILKVPETDEVELTCQATGYPLAEVSWPNVSVPANTSHSRTPEGLYQVTSVLRLKPPPGRNFSCVFWNTHVRELTLASIDLQSQMEPRTHPT

SEQ ID NO: 1241 - protein, 201 aa, Artificial Sequence
  PD-L2 ECD v38
LFTVTVPKELYIIEQGSNVTLECNFDTGSHVNLGAITASLQKVENDTSPHRERATLLEEQLPLGKALFHIPHVQVGDEGQYQCIIIYGDAWDYKYLTLKVKASYRKINTHILKVPETDEVELTCQATGYPLAEVSWPNVSVPANTSHSRTPEGLYQVTSVLRLKPPPGRNFSCVFWNTHVRELTLASIDLQSQMEPRTHPT

SEQ ID NO: 1242 - protein, 201 aa, Artificial Sequence
  PD-L2 ECD v39
LFTVTVPKELYIIEQGSNVTLECNFDTGSHVNLGAITASLQKVENDTSPHRERATLLEEQLPLGKASFHIPHVRVGDEGQYQCIITYGVAWDYKYLTLKVKASYRKINTHILKVPETDEVELTCQATGYPLAEVSWPNVSVPANTSHSRTPEGLYQVTSVLRLKPPPGRNFSCVFWNTHVRELTLASIDLQSQMEPRTHPT

SEQ ID NO: 1243 - protein, 201 aa, Artificial Sequence
  PD-L2 ECD v40
LFTVTVPKELYIIEHGSNVTLECNFDTVSHVNLGAITASLQKVENDTSPHRERATLLEEQLPLGKASFHIPHVQVGDEGQYQCIITYGVAWDYKYLTLKVKASYRKINTHILKVPETDEVELTCQATGYPLAEVSWPNVSVPANTSHSRTPEGLYQVTSVLRLKPPPGRNFSCVFWNTHVRELTLASIDLQSQMEPRTHPT

SEQ ID NO: 1244 - protein, 201 aa, Artificial Sequence
  PD-L2 ECD v41
LFTVTVPKELYIVEQGSNVTLECNFDTGSHVNLGAITAILQKVDNDTSPHRERATLLEEQLPLGKALFHIPQVQVRDEGQYQCIIIYGVAWDYKYLTLKVKASYRKINTHILKVPETDEVELTCQATGYPLAEVSWPNVSVPANTSHSRTPEGLYQVTSVLRLKPPPGRNFSCVFWNTHVRELTLASIDLQSQMEPRTHPT

SEQ ID NO: 1245 - protein, 201 aa, Artificial Sequence
  PD-L2 ECD v42
LFTVTVPKELYIIEHGSNVTLECNFDTGSHVNLGAITASLQKVDNDTSPHRERATLLEEQLPLGKALFHIPHVQVRDEGQYRCIIIYGDAWDYKYLTLKVKASYRKINTHILKVPETDEVELTCQATGYPLAEVSWPNVSVPANTSHSRTPEGLYQVTSVLRLKPPPGRNFSCVFWNTHVRELTLASIDLQSQMEPRTHPT

SEQ ID NO: 1246 - protein, 201 aa, Artificial Sequence
  PD-L2 ECD v43
LFTVTVPKELYIIEQGSNVTLECNFDTGSHVNLGAITASLQKVENDTSPHRERATLLEEQLPLGKASFHIPQVQVRDEGQYQCIIIYGDAWDYKYLTLKVKASYRKINTHILKVPETDEVELTCQATGYPLAEVSWPNVSVPANTSHSRTPEGLYQVTSVLRLKPPPGRNFSCVFWNTHVRELTLASIDLQSQMEPRTHPT

SEQ ID NO: 1247 - protein, 201 aa, Artificial Sequence
  PD-L2 ECD v44
LFTVTVPKELYIIEQGSNVTLECNFDTGSHVNLGAITASLQKVENDASPHRERATLLEEQLPLGKASFHIPQVQVRDEGQYQCIIIYGVAWDYKYLTLKVKASYRKINTHILKVPETDEVELTCQATGYPLAEVSWPNVSVPANTSHSRTPEGLYQVTSVLRLKPPPGRNFSCVFWNTHVRELTLASIDLQSQMEPRTHPT

SEQ ID NO: 1248 - protein, 201 aa, Artificial Sequence
  PD-L2 ECD v45
LFTVTVPKELYIVEQGSNVTLECNFDTGSHVNLGAITASLQKVENDTSPHRERATLLEEQLPLGKASFHIPQVQVRDEGQYRCIIIYGVAWDYKYLTLKVKASYRKINTHILKVPETDEVELTCQATGYPLAEVSWPNVSVPANTSHSRTPEGLYQVTSVLRLKPPPGRNFSCVFWNTHVRELTLASIDLQSQMEPRTHPT

SEQ ID NO: 1249 - protein, 201 aa, Artificial Sequence
  PD-L2 ECD v46
LFTVTVPKELYIVEQGSNVTLECNFDTGSHVNLGAITASLQKVENDTSPHRERATLLEEQLPLGKASFHIPQVQVRDEGQYQCIIIYGDAWDYKYLTLKVKASYRKINTHILKVPETDEVELTCQATGYPLAEVSWPNVSVPANTSHSRTPEGLYQVTSVLRLKPPPGRNFSCVFWNTHVRELTLASIDLQSQMEPRTHPT

SEQ ID NO: 1250 - protein, 201 aa, Artificial Sequence
  PD-L2 ECD v47
LFTVTVPKELYIVEHGSNVTLECNFDTGSHVNLGAITASLQKVENDTSPHRERATLLEEQLPLGKALFHIPQVQVRDEGQYRCIIIYGDAWDYKYLTLKVKASYRKINTHILKVPETDEVELTCQATGYPLAEVSWPNVSVPANTSHSRTPEGLYQVTSVLRLKPPPGRNFSCVFWNTHVRELTLASIDLQSQMEPRTHPT

SEQ ID NO: 1251 - protein, 201 aa, Artificial Sequence
  PD-L2 ECD v48
LFTVTVPKELYIVEQGSNVTLECNFDTGSHVNLGAITASLQKVENDTSPHRERATLLEEQLPLGKASFHIPQVQVRDEGQYRCIIIYGDAWDYKYLTLKVKASYRKINTHILKVPETDEVELTCQATGYPLAEVSWPNVSVPANTSHSRTPEGLYQVTSVLRLKPPPGRNFSCVFWNTHVRELTLASIDLQSQMEPRTHPT

SEQ ID NO: 1252 - protein, 201 aa, Artificial Sequence
  PD-L2 ECD v49
LFTVTVPKELYIIEQGSNVTLECNFDTGSHMNLGAITASLQKVENDTSPHRERATLLEEQLPLGKALFHIPQVQVRDEGQYRCIIIYGDAWDYKYLTLKVKASYRKINTHILKVPETDEVELTCQATGYPLAEVSWPNVSVPANTSHSRTPEGLYQVTSVLRLKPPPGRNFSCVFWNTHVRELTLASIDLQSQMEPRTHPT

SEQ ID NO: 1253 - protein, 201 aa, Artificial Sequence
  PD-L2 ECD v50
LFTVTVPKELYIVEQGSNVTLECNFDTGSHVNLGAITASLQKVENDASPHRERATLLEEQLPLGKASFHIPQVQVRDEGQYRCIIIYGVAWDYKYLTLKVKASYRKINTHILKVPETDEVELTCQATGYPLAEVSWPNVSVPANTSHSRTPEGLYQVTSVLRLKPPPGRNFSCVFWNTHVRELTLASIDLQSQMEPRTHPT

SEQ ID NO: 1254 - protein, 201 aa, Artificial Sequence
  PD-L2 ECD v51
LFTVTVPKELYIVEQGSNVTLECNFDTGSHANLGAITASLQKVESDTSPHRERATLLEEQLPLGKASFHIPQVQVRDEGQYRCIIIYGDAWDYKYLTLKVKASYRKINTHILKVPETDEVELTCQATGYPLAEVSWPNVSVPANTSHSRTPEGLYQVTSVLRLKPPPGRNFSCVFWNTHVRELTLASIDLQSQMEPRTHPT

SEQ ID NO: 1255 - protein, 201 aa, Artificial Sequence
  PD-L2 ECD v52
  VARIANT (65)..(65): Xaa is unknown
LFTVTVPKELYIVEHGSNVALECNFDTGSHVNLGAITASLQKVENDASPHRERATLLEEQLPLGXASFHIPQVQVRDEGQYRCIIIYGDAWDYKYLTLKVKASYRKINTHILKVPETDEVELTCQATGYPLAEVSWPNVSVPANTSHSRTPEGLYQVTSVLRLKPPPGRNFSCVFWNTHVRELTLASIDLQSQMEPRTHPT

SEQ ID NO: 1256 - protein, 201 aa, Artificial Sequence
  PD-L2 ECD v53
LFTVTVPKELYIIEQGSNVTLECNFDTGSHVNLGAITASLQKVENDASPHRERATLLEEQLPLGKASFLIPQVQVRDEGQYRCIIIYGDAWDYKYLTLKVKASYRKINTHILKVPETDEVELTCQATGYPLAEVSWPNVSVPANTSHSRTPEGLYQVTSVLRLKPPPGRNFSCVFWNTHVRELTLASIDLQSQMEPRTHPT

SEQ ID NO: 1257 - protein, 201 aa, Artificial Sequence
  PD-L2 ECD v54
LFTVTVPKELYIVEQGSNVTLECNFDTGSHVNLGAITASLQKVENDASPHRERATLLEEQLPLGKASFLIPQVQVGDEGQYQCIIIYGDAWDYKYLTLKVKASYRKINTHILKVPETDEVELTCQATGYPLAEVSWPNVSVPANTSHSRTPEGLYQVTSVLRLKPPPGRNFSCVFWNTHVRELTLASIDLQSQMEPRTHPT

SEQ ID NO: 1258 - protein, 201 aa, Artificial Sequence
  PD-L2 ECD v55
LFTVTVPKELYVVEQGSNVTLECNFDTGSHVNLGAITASLQKVENDASPHRERATLLEEQLPLGKASFHIPQVQVRDEGQYRCIIIYGDAWDYKYLTLKVKASYRKINTHILKVPETDEVELTCQATGYPLAEVSWPNVSVPANTSHSRTPEGLYQVTSVLRLKPPPGRNFSCVFWNTHVRELTLASIDLQSQMEPRTHPT

SEQ ID NO: 1259 - protein, 201 aa, Artificial Sequence
  PD-L2 ECD v56
LFTVTVPKELYIVEQGSNVTLECNFDTGSHVNLGAITASLQKVENDTSPHRERATLLEEQLPLGKASFHIPQVQVGNEGQYRCIIIYGDAWDYKYLTLKVKASYRKINTHILKVPETDEVELTCQATGYPLAEVSWPNVSVPANTSHSRTPEGLYQVTSVLRLKPPPGRNFSCVFWNTHVRELTLASIDLQSQMEPRTHPT

SEQ ID NO: 1260 - protein, 201 aa, Artificial Sequence
  PD-L2 ECD v57
LFTVTVPKELYIVEQGSNVTLECNFDTGSHVNLGAITASLQKVENDASPHRERATLLEEQLPLGKASFHIPQVQVGDEGQYQCIIIYGDAWDYKYLTLKVKASYRKINTHILKVPETDEVELTCQATGYPLAEVSWPNVSVPANTSHSRTPEGLYQVTSVLRLKPPPGRNFSCVFWNTHVRELTLASIDLQSQMEPRTHPT

SEQ ID NO: 1261 - protein, 201 aa, Artificial Sequence
  PD-L2 ECD v58
LFTVTVPKELYIVEQGSNVTLECNFDTGSHVNLGAITASLQKVENDASPHRERATLLEEQLPLGKASFHIPQVQVRDEGQYRCIIIYGDAWDYKYLTLKVKASYRKINTHILKVPETDEVELTCQATGYPLAEVSWPNVSVPANTSHSRTPEGLYQVTSVLRLKPPPGRNFSCVFWNTHVRELTLASIDLQSQMEPRTHPT

SEQ ID NO: 1262 - protein, 201 aa, Artificial Sequence
  PD-L2 ECD v59
LFTVTVPKELYIVEQGSNVTLECDFDTGSHVNLGAITASLQKVENDTSPHRERATLLEEQLPLGKASFHIPQVQVRDEGQYRCIIIYGDAWDYKYLTLKVKASYRKINTHILKVPETDEVELTCQATGYPLAEVSWPNVSVPANTSHSRTPEGLYQVTSVLRLKPPPGRNFSCVFWNTHVRELTLASIDLQSQMEPRTHPT

SEQ ID NO: 1263 - protein, 102 aa, Homo sapiens
  MISC_FEATURE: PD-L2 IgV wildtype
LFTVTVPKELYIIEHGSNVTLECNFDTGSHVNLGAITASLQKVENDTSPHRERATLLEEQLPLGKASFHIPQVQVRDEGQYQCIIIYGVAWDYKYLTLKVKA

SEQ ID NO: 1264 - protein, 201 aa, Artificial Sequence
  PD-L2 ECD v61
LFTVTVPKELYIVEQGSNVTLECNFDTGSHVNLGAVTASLQKVENDASPHRERATLLEEQLPLGKALFHIPQVQVRDEGQYQCIIIYGDAWDYKYLTLKVKASYRKINTHILKVPETDEVELTCQATGYPLAEVSWPNVSVPANTSHSRTPEGLYQVTSVLRLKPPPGRNFSCVFWNTHVRELTLASIDLQSQMEPRTHPT

SEQ ID NO: 1265 - protein, 201 aa, Artificial Sequence
  PD-L2 ECD v62
LFTVTVPKELYIIEQGSNVTLECNFDTGSHVNLGAITASLQKVENDASPHRERATLLEEQLPLGRALFHIPQVQVRDEGQYRCIIIYGDAWDYKYLTLKVKASYRKINTHILKVPETDEVELTCQATGYPLAEVSWPNVSVPANTSHSRTPEGLYQVTSVLRLKPPPGRNFSCVFWNTHVRELTLASIDLQSQMEPRTHPT

SEQ ID NO: 1266 - protein, 201 aa, Artificial Sequence
  PD-L2 ECD v63
LFTVTVPKELYIIEQGSNVTLECNFDTGSHVNPGAITASLQKVENDASPHRERATLLEEQLPLGKALFHISQVQVRDEGQYQCIIIYGDAWDYKYLTLKVKASYRKINTHILKVPETDEVELTCQATGYPLAEVSWPNVSVPANTSHSRTPEGLYQVTSVLRLKPPPGRNFSCVFWNTHVRELTLASIDLQSQMEPRTHPT

SEQ ID NO: 1267 - protein, 201 aa, Artificial Sequence
  PD-L2 ECD v64
LFTVTVPKELYIVEQGSNVTLECNFDTGSHVNLGAITASLQKVENDTSPHRERATLLEEQLPLGKASFHIPHVQVGDEGQYQCIITYGVAWDYKYLTLKVKASYRKINTHILKVPETDEVELTCQATGYPLAEVSWPNVSVPANTSHSRTPEGLYQVTSVLRLKPPPGRNFSCVFWNTHVRELTLASIDLQSQMEPRTHPT

SEQ ID NO: 1268 - protein, 201 aa, Artificial Sequence
  PD-L2 ECD v65
LFTVTVPKELYIIEQGSNVTLECNFDTGSHVNLGAITASLQKVENDASPHRERATLLEEQLPLGKALFHIPQVQVRDEGQYRCIIIYGDAWDYKYLTLKVKASYRKINTHILKVPETDEVELTCQATGYPLAEVSWPNVSVPANTSHSRTPEGLYQVTSVLRLKPPPGRNFSCVFWNTHVRELTLASIDLQSQMEPRTHPT

SEQ ID NO: 1269 - protein, 201 aa, Artificial Sequence
  PD-L2 ECD v66
LLTVTVPKELYIIEQGSNVTLECNFDTGSHVNLGAITASLQKVENEASPHRERATLLEEQLPLGKASFHIPHVQVGDEGQYRCIIIYGDAWDYKYLTLKVKASYRKINTHILKVPETDEVELTCQATGYPLAEVSWPNVSVPANTSHSRTPEGLYQVTSVLRLKPPPGRNFSCVFWNTHVRELTLASIDLQSQMEPRTHPT

SEQ ID NO: 1270 - protein, 201 aa, Artificial Sequence
  PD-L2 ECD v67
LFTVTVPKELYIVEQGSNVTLECNFDTGSHVNFGAITASLQKVENDASPHRERATLLEEQLPLGKASFHIPQVQVRDEGQYRCIIIYGDAWDYKYLTLKVKASYRKINTHILKVPETDEVELTCQATGYPLAEVSWPNVSVPANTSHSRTPEGLYQVTSVLRLKPPPGRNFSCVFWNTHVRELTLASIDLQSQMEPRTHPT

SEQ ID NO: 1271 - protein, 201 aa, Artificial Sequence
  PD-L2 ECD v68
LFTVTVPKELYIVEQGSNVTLECNFDTGSHVNLGAITASLQKVENDASPHRERATLLGEQLPLGKALFHIPQVQVRDEGQYRCIIIYGDAWDYKYLTLKVKASYRKINTHILKVPETDEVELTCQATGYPLAEVSWPNVSVPANTSHSRTPEGLYQVTSVLRLKPPPGRNFSCVFWNTHVRELTLASIDLQSQMEPRTHPT

SEQ ID NO: 1272 - protein, 201 aa, Artificial Sequence
  PD-L2 ECD v69
LFTVTVPKELYIIEQGSNVTLECSFDTGSHVNLGAITASLQKVENDASPHRERATLLEEQLPLGKASFHIPHVQVGDEGQYQCIIIYGDAWDYKYLTLKVKASYRKINTHILKVPETDEVELTCQATGYPLAEVSWPNVSVPANTSHSRTPEGLYQVTSVLRLKPPPGRNFSCVFWNTHVRELTLASIDLQSQMEPRTHPT

SEQ ID NO: 1273 - protein, 201 aa, Artificial Sequence
  PD-L2 ECD v70
LFTVTVPKELYIVEQGSNVTLECNFDTGSHVNLGAITASLQKVVNDASPHRERATLLEEQLPLGKASFHIPQVQVRDEGQYRCIIIYGDAWDYKYLTLKVKASYRKINTHILKVPETDEVELTCQATGYPLAEVSWPNVSVPANTSHSRTPEGLYQVTSVLRLKPPPGRNFSCVFWNTHVRELTLASIDLQSQMEPRTHPT

SEQ ID NO: 1274 - protein, 201 aa, Artificial Sequence
  PD-L2 ECD v71
LFTVTVPKELYIIEQGSDVTLECNFDTGSHVNLGAITASLQKVENDASPHRERATLLEEQLPLGKASFHIPHAQVGDEGQYQCIITYGDAWDYKYLTLKVKASYRKINTHILKVPETDEVELTCQATGYPLAEVSWPNVSVPANTSHSRTPEGLYQVTSVLRLKPPPGRNFSCVFWNTHVRELTLASIDLQSQMEPRTHPT

SEQ ID NO: 1275 - protein, 201 aa, Artificial Sequence
  PD-L2 ECD v72
LFTVTVPKELYIVEQGSNVTLECNFDTGSHVNLGAIAASLQKVDNDTCPHRERATLLEEQLPLGKALFHIPQVQVRDEGQYRCIIIYGDAWDYKYLTLKVKASYRKINTHILKVPETDEVELTCQATGYPLAEVSWPNVSVPANTSHSRTPEGLYQVTSVLRLKPPPGRNFSCVFWNTHVRELTLASIDLQSQMEPRTHPT

SEQ ID NO: 1276 - protein, 201 aa, Artificial Sequence
  PD-L2 ECD v73
LFTVTVPKELYIIEQGSNVTLECNFDTGSHVNHGAITASLQKVENDTSPHRERATLLEEQLPLGKALFHIPQVQVGDEGQYRCIIIYGDAWDYKYLTLKVKASYRKINTHILKVPETDEVELTCQATGYPLAEVSWPNVSVPANTSHSRTPEGLYQVTSVLRLKPPPGRNFSCVFWNTHVRELTLASIDLQSQMEPRTHPT

SEQ ID NO: 1277 - protein, 201 aa, Artificial Sequence
  PD-L2 ECD v74
LFTVTVPKELYIVEQGSNVTLECNFDTGSHVNLGAITASLQKVENDASPHRERATLLEEQLPLGKASFHIPHVQVGDEGQYQCIITYGVAWDYKYLTLKVKASYRKINTHILKVPETDEVELTCQATGYPLAEVSWPNVSVPANTSHSRTPEGLYQVTSVLRLKPPPGRNFSCVFWNTHVRELTLASIDLQSQMEPRTHPT

SEQ ID NO: 1278 - protein, 201 aa, Artificial Sequence
  PD-L2 ECD v75
LFTVTVPKELYIIEQGSNVTLECNFDTGSHVNLGAITAILQKVDNDTSPHRERATLLEEQLPLGKASFHIPHVQGGDEGQYRCIIIYGDAWDYKYLTLKVKASYRKINTHILKVPETDEVELTCQATGYPLAEVSWPNVSVPANTSHSRTPEGLYQVTSVLRLKPPPGRNFSCVFWNTHVRELTLASIDLQSQMEPRTHPT

SEQ ID NO: 1279 - protein, 201 aa, Artificial Sequence
  PD-L2 ECD v76
LFTVTVPKELYIIEQGSNVTLECNFDTGSHVNLGAITASLQKVENDASPHRERATLLEEQLPLGKALFHIPQVQVGDEGQYRCIIIYGDAWDYKYLTLKVKASYRKINTHILKVPETDEVELTCQATGYPLAEVSWPNVSVPANTSHSRTPEGLYQVTSVLRLKPPPGRNFSCVFWNTHVRELTLASIDLQSQMEPRTHPT

SEQ ID NO: 1280 - protein, 201 aa, Artificial Sequence
  PD-L2 ECD v77
LFTVTVPKELYIVEQGSNVTLECNFDTGSHVNLGAITASLQKVENDASPHRERATLLEEQLPLGKALFHIPHVQVGDEGQYRCIIIYGDAWDYKYLTLKVKASYRKINTHILKVPETDEVELTCQATGYPLAEVSWPNVSVPANTSHSRTPEGLYQVTSVLRLKPPPGRNFSCVFWNTHVRELTLASIDLQSQMEPRTHPT

SEQ ID NO: 1281 - protein, 98 aa, Artificial Sequence
  PD-L2 IgV v1
FTVTVPKELYIIEQGSNVTLECNFDTGSHVNLGAITASLQKVENDTSPHRERATLLEEQLPLGKASFHIPQVQVRDEGQYQCIIIYGVAWDYKYLTLK

SEQ ID NO: 1282 - protein, 98 aa, Artificial Sequence
  PD-L2 IgV v2
FTVTVPKELYIIEHGSNVTLECDFDTGSHVNLGAITASLQKVENDTSPHRERATLLEEQLPLGKASFHIPQVQVRDEGQYQCIIIYGVAWDYKYLTLK

SEQ ID NO: 1283 - protein, 98 aa, Artificial Sequence
  PD-L2 IgV v3
FTVTVPKELYIIEHGSNVTLECNFDTGSHVNLGAITASLQKVDNDTSPHRERATLLEEQLPLGKASFHIPQVQVRDEGQYQCIIIYGVAWDYKYLTLK

SEQ ID NO: 1284 - protein, 98 aa, Artificial Sequence
  PD-L2 IgV v4
FTVTVPKELYIIEHGSNVTLECNFDTGSHVNLGAITASLQKVENDTSPHRERATLLEEQLPLGKASFHIPQVQVRDEGQYQCIIIYGDAWDYKYLTLK

SEQ ID NO: 1285 - protein, 98 aa, Artificial Sequence
  PD-L2 IgV v5
FTVTVPKELYIIEHGSNVTLECNFDTGSHVNLGAITASLQKVENDTSPHRERATLLEEQLPLGKASFHIPQVQVRDEGQYRCIIIYGDAWDYKYLTLK

SEQ ID NO: 1286 - protein, 98 aa, Artificial Sequence
  PD-L2 IgV v6
FTVTVPKELYIIEHGSNVTLECNFDTGSHVNLGAITASLQKVENDTSPHRERATLLEGQLPLGKASFHIPQVQVRDEGQYRCIIIYGVAWDYKYLTLK

SEQ ID NO: 1287 - protein, 98 aa, Artificial Sequence
  PD-L2 IgV v7
FTVTVPKELYIIEHGSNVTLECNFDTGSHVNLGAITAILQKVENDTSPHRERATLLEEQLPLGKASFHIPQVQVRDEGQYQCIIIYGDAWDYKYLTLK

SEQ ID NO: 1288 - protein, 98 aa, Artificial Sequence
  PD-L2 IgV v8
FTVTVPKELYIIEHGSNVTLECNFDTGSHVNLGAITASLQKVENDTSPHRERATLLEEQLPLGKALFHIPQVQVRDEGQYQCIIIYGDAWDYKYLTLK

SEQ ID NO: 1289 - protein, 98 aa, Artificial Sequence
  PD-L2 IgV v9
FTVTVPKELYIIEHGSNVTLECNFDTGSHVNLGAITASLQKVENDTSPHRERATLLEEQLPLGKALFHIPQVQVRDEGQYQCIFIYGVAWDYKYLTLK

SEQ ID NO: 1290 - protein, 98 aa, Artificial Sequence
  PD-L2 IgV v10
FTVTVPKELYIIEHGSNVTLECNFDTGSHVNLGAITASLQKVENDTSPHRERATLLEEQLPLGKALFHIPQVQVRDEGQYQCIITYGVAWDYKYLTLK

SEQ ID NO: 1291 - protein, 98 aa, Artificial Sequence
  PD-L2 IgV v11
FTVTVPKELYIIEQGSNVTLECNFDTGSHVNLGAITASLQKVENDTSPHRERATLLEEQLPLGRASFHIPQVQVRDEGQYQCIIIYGVAWDYKYLTLK

SEQ ID NO: 1292 - protein, 98 aa, Artificial Sequence
  PD-L2 IgV v12
FTVTVPKELYIIEQGSNVTLECNFDTGSHVNLGAITASLQKVENDTSPHRERATLLEEQLPLGKASFHIPHVQVRDEGQYQCIIIYGDAWDYKYLTLK

SEQ ID NO: 1293 - protein, 98 aa, Artificial Sequence
  PD-L2 IgV v13
FTVTVPKELYIIEQGSNVTLECNFDTGSHVNLGAITASLQKVENDTSPHRERATLLEEQLPLGKALFHIPQVQVGDEGQYQCIIIYGVAWDYKYLTLK

SEQ ID NO: 1294 - protein, 98 aa, Artificial Sequence
  PD-L2 IgV v14
FTVTVPKELYIIEQGSNVTLECNFDTGSHVNLGAITASLQKVENDTSPHRERATLLEEQLPLGKASFHIPQVQVGDEGQYQCIFIYGVAWDYKYLTLK

SEQ ID NO: 1295 - protein, 98 aa, Artificial Sequence
  PD-L2 IgV v15
FTVTVPKELYIIEQGSNVTLECNFDTGSHVNLGAITASLQKVENDASPHRERATLLEEQLPLGKASFHIPQVQVRDEGQYRCIIIYGVAWDYKYLTLK

SEQ ID NO: 1296 - protein, 98 aa, Artificial Sequence
  PD-L2 IgV v16
FTVTVPKELYIIEQGSNVTLECNFDTGSHVNLGAITASLQKVENDTSPHRERATLLEEQLPLGKASFHIPQVQVRDEGQYRCIIIYGDAWDYKYLTLK

SEQ ID NO: 1297 - protein, 98 aa, Artificial Sequence
  PD-L2 IgV v17
FTVTVPKELYIIEQGSNVTLESNFDTGSHVNLGAITASLQKVENDTSPHRERATLLEEQLPLGKASFHIPQVQVRDEGQYQCIITYGVAWDYKYLTLK

SEQ ID NO: 1298 - protein, 98 aa, Artificial Sequence
  PD-L2 IgV v18
FTVTVPKELYIIEQGSNVTLECNFDTGSHVNLGAITAILQKVENDTSPHRERATLLEEQLPLGKASFHIPQVQVRDEGQYQCIITYGVAWDYKYLTLK

SEQ ID NO: 1299 - protein, 98 aa, Artificial Sequence; identical to SEQ ID NO: 1294
  PD-L2 IgV v19

SEQ ID NO: 1300 - protein, 98 aa, Artificial Sequence
  PD-L2 IgV v20
FTVTVPKELYIIEHGSNVTLECNFDTGSHVNLGAITASLQKVDNDTSPHRERATLLEEQLPLGKASFHIPQVQVRDEGQYQCIIIYGDARDYKYLTLK

SEQ ID NO: 1301 - protein, 98 aa, Artificial Sequence
  PD-L2 IgV v21
FTVTVPKELYIVEHGSNVTLECNFDTGSHVNLGAITASLQKVENDTSPHRERATLLEEQLPLGKALFHIPQVQVRDEGQYQCIIIYGDAWDYKYLTLK

SEQ ID NO: 1302 - protein, 98 aa, Artificial Sequence
  PD-L2 IgV v22
FTVTVPKELYIIEQGSNVTLECNFDTGSHVNLGAITASLQKVENDTSPHRERATLLEEQLPLGKALFHIPQVQVRDEGQYQCIITYGVAWDYKYLTLK

SEQ ID NO: 1303 - protein, 98 aa, Artificial Sequence
  PD-L2 IgV v23
FTVTVPKELYIVEQGSNVTLECNFDTGSHVNLGAITASLQKVENDTSPHRERATLLEEQLPLGKALFHIPQVQVRDEGQYQCIITYGVAWDYKYLTLK

SEQ ID NO: 1304 - protein, 98 aa, Artificial Sequence
  PD-L2 IgV v24
FTVTVPKELYIVEQGSNVTLECNFDTGSHVNLGAITASLQKVDNDTSPHRERATLLEEQLPLGKASFHIPQVQVRDEGQYQCIIIYGDAWDYKYLTLK

SEQ ID NO: 1305 - protein, 98 aa, Artificial Sequence
  PD-L2 IgV v25
FTVTVPKELYIVEHGSNVTLECNFDTGSHVNLGAITAILQKVDNDTSPHRERATLLEEQLPLGKASFHIPQVQVRDEGQYRCIIIYGDAWDYKYLTLK

SEQ ID NO: 1306 - protein, 98 aa, Artificial Sequence
  PD-L2 IgV v26
FTVTVPKELYIVEHGSNVTLECNFDTGSHVNLGAITASLQKVDNDTSPHRERATLLEEQLPLGKASFHIPQVQVRDEGQYRCIIIYGDAWDYKYLTLK

SEQ ID NO: 1307 - protein, 98 aa, Artificial Sequence
  PD-L2 IgV v27
FTVTVPKELYIVEHGSNVTLECNFDTGSHVNLGAITASLQKVENDTSPHRERATLLEEQLPLGKASFHIPHVQVGDEGQYQCIITYGVAWDYKYLTLK

SEQ ID NO: 1308 - protein, 98 aa, Artificial Sequence
  PD-L2 IgV v28
FTVTVPKELYIVEQGSNVTLECNFDTGSHVNLGAITASLQKVENDTSPHRERATLLEEQLPLGKASFHIPQVQVGDEGQYQCIFIYGVAWDYKYLTLK

SEQ ID NO: 1309 - protein, 98 aa, Artificial Sequence
  PD-L2 IgV v29
FTVTVPKELYIIEQGSNVTLECNFDTGSHVNLGAITAILQKVENDTSPHRERATLLEEQLPLGKASFHIPQVQVGDEGQYQCIIIYGDAWDYKYLTLK

SEQ ID NO: 1310 - protein, 98 aa, Artificial Sequence
  PD-L2 IgV v30
FTVTVPKELYIIEQGSNVTLECNFDTGSHVNLGAITASLQKVENDTSPHRERATLLEEQLPLGKALFHIPQVQVGDEGQYQCIFIYGVAWDYKYLTLK

SEQ ID NO: 1311 - protein, 98 aa, Artificial Sequence
  PD-L2 IgV v31
FTVTVPKELYIIEQGSNVTLECNFDTGSHVNLGAITASLQKVENDASPHRERATLLEEQLPLGKASFHIPHVQVGDEGQYQCIITYGVAWDYKYLTLK

SEQ ID NO: 1312 - protein, 98 aa, Artificial Sequence
  PD-L2 IgV v32
FTVTVPKELYIIEQGSNVTLECNFDTGSHVNLGAITASLQKVENDASPHRERATLLEEQLPLGKASFHIPHVQVGDEGQYQCIIIYGVAWDYKYLTLK

SEQ ID NO: 1313 - protein, 98 aa, Artificial Sequence
  PD-L2 IgV v33
FTVTVPKELYIVEQGSNVTLECNFDTGSHVNLGAITASLQKVENDASPHRERATLLEEQLPLGKASFHIPHVQVGDEGQYQCIIIYGVAWDYKYLTLK

SEQ ID NO: 1314 - protein, 98 aa, Artificial Sequence
  PD-L2 IgV v34
FTVTVPKELYIIEQGSNVTLECNFDTGSHVNLGAITASLQKVDNDTSPHRERATLLEEQLPLGKASFHIPQVQVGDEGQYQCIFIYGVAWDYKYLTLK

SEQ ID NO: 1315 - protein, 98 aa, Artificial Sequence
  PD-L2 IgV v35
FTVTVPKELYIIEQGSNVTLECNFDTGSHVNLGAITAILQKVENDTSPHRERATLLEEQLPLGKALFHIPQVQVRDEGQYQCIIIYGDAWDYKYLTLK

SEQ ID NO: 1316 - protein, 98 aa, Artificial Sequence
  PD-L2 IgV v36
FTVTVPKELYIIEQGSNVTLECNFDTGSHVDLGAITASLQKVENDTSPHRERATLLEEQLPLGKALFHIPQVQVRDEGQYQCIIIYGDAWDYKYLTLK

SEQ ID NO: 1317 - protein, 98 aa, Artificial Sequence
  PD-L2 IgV v37
FTVTVPKELYIIEHGSNVTLECNFDTGSHVDLGAITASLQKVENDTSPHRERATLLEEQLPLGKALFHIPQVQVRDEGQYQCIIIYGDAWDYKYLTLK

SEQ ID NO: 1318 - protein, 98 aa, Artificial Sequence
  PD-L2 IgV v38
FTVTVPKELYIIEQGSNVTLECNFDTGSHVNLGAITASLQKVENDTSPHRERATLLEEQLPLGKALFHIPHVQVGDEGQYQCIIIYGDAWDYKYLTLK

SEQ ID NO: 1319 - protein, 98 aa, Artificial Sequence
  PD-L2 IgV v39
FTVTVPKELYIIEQGSNVTLECNFDTGSHVNLGAITASLQKVENDTSPHRERATLLEEQLPLGKASFHIPHVRVGDEGQYQCIITYGVAWDYKYLTLK

SEQ ID NO: 1320 - protein, 98 aa, Artificial Sequence
  PD-L2 IgV v40
FTVTVPKELYIIEHGSNVTLECNFDTVSHVNLGAITASLQKVENDTSPHRERATLLEEQLPLGKASFHIPHVQVGDEGQYQCIITYGVAWDYKYLTLK

SEQ ID NO: 1321 - protein, 98 aa, Artificial Sequence
  PD-L2 IgV v41
FTVTVPKELYIVEQGSNVTLECNFDTGSHVNLGAITAILQKVDNDTSPHRERATLLEEQLPLGKALFHIPQVQVRDEGQYQCIIIYGVAWDYKYLTLK

SEQ ID NO: 1322 - protein, 98 aa, Artificial Sequence
  PD-L2 IgV v42
FTVTVPKELYIIEHGSNVTLECNFDTGSHVNLGAITASLQKVDNDTSPHRERATLLEEQLPLGKALFHIPHVQVRDEGQYRCIIIYGDAWDYKYLTLK

SEQ ID NO: 1323 - protein, 98 aa, Artificial Sequence
  PD-L2 IgV v43
FTVTVPKELYIIEQGSNVTLECNFDTGSHVNLGAITASLQKVENDTSPHRERATLLEEQLPLGKASFHIPQVQVRDEGQYQCIIIYGDAWDYKYLTLK

SEQ ID NO: 1324 - protein, 98 aa, Artificial Sequence
  PD-L2 IgV v44
FTVTVPKELYIIEQGSNVTLECNFDTGSHVNLGAITASLQKVENDASPHRERATLLEEQLPLGKASFHIPQVQVRDEGQYQCIIIYGVAWDYKYLTLK

SEQ ID NO: 1325 - protein, 98 aa, Artificial Sequence
  PD-L2 IgV v45
FTVTVPKELYIVEQGSNVTLECNFDTGSHVNLGAITASLQKVENDTSPHRERATLLEEQLPLGKASFHIPQVQVRDEGQYRCIIIYGVAWDYKYLTLK

SEQ ID NO: 1326 - protein, 98 aa, Artificial Sequence
  PD-L2 IgV v46
FTVTVPKELYIVEQGSNVTLECNFDTGSHVNLGAITASLQKVENDTSPHRERATLLEEQLPLGKASFHIPQVQVRDEGQYQCIIIYGDAWDYKYLTLK

SEQ ID NO: 1327 - protein, 98 aa, Artificial Sequence
  PD-L2 IgV v47
FTVTVPKELYIVEHGSNVTLECNFDTGSHVNLGAITASLQKVENDTSPHRERATLLEEQLPLGKALFHIPQVQVRDEGQYRCIIIYGDAWDYKYLTLK

SEQ ID NO: 1328 - protein, 98 aa, Artificial Sequence
  PD-L2 IgV v48
FTVTVPKELYIVEQGSNVTLECNFDTGSHVNLGAITASLQKVENDTSPHRERATLLEEQLPLGKASFHIPQVQVRDEGQYRCIIIYGDAWDYKYLTLK

SEQ ID NO: 1329 - protein, 98 aa, Artificial Sequence
  PD-L2 IgV v49
FTVTVPKELYIIEQGSNVTLECNFDTGSHMNLGAITASLQKVENDTSPHRERATLLEEQLPLGKALFHIPQVQVRDEGQYRCIIIYGDAWDYKYLTLK

SEQ ID NO: 1330 - protein, 98 aa, Artificial Sequence
  PD-L2 IgV v50
FTVTVPKELYIVEQGSNVTLECNFDTGSHVNLGAITASLQKVENDASPHRERATLLEEQLPLGKASFHIPQVQVRDEGQYRCIIIYGVAWDYKYLTLK

SEQ ID NO: 1331 - protein, 98 aa, Artificial Sequence
  PD-L2 IgV v51
FTVTVPKELYIVEQGSNVTLECNFDTGSHANLGAITASLQKVESDTSPHRERATLLEEQLPLGKASFHIPQVQVRDEGQYRCIIIYGDAWDYKYLTLK

SEQ ID NO: 1332 - protein, 98 aa, Artificial Sequence
  PD-L2 IgV v52
  VARIANT (64)..(64): Xaa is unknown
FTVTVPKELYIVEHGSNVALECNFDTGSHVNLGAITASLQKVENDASPHRERATLLEEQLPLGXASFHIPQVQVRDEGQYRCIIIYGDAWDYKYLTLK

SEQ ID NO: 1333 - protein, 98 aa, Artificial Sequence
  PD-L2 IgV v53
FTVTVPKELYIIEQGSNVTLECNFDTGSHVNLGAITASLQKVENDASPHRERATLLEEQLPLGKASFLIPQVQVRDEGQYRCIIIYGDAWDYKYLTLK

SEQ ID NO: 1334 - protein, 98 aa, Artificial Sequence
  PD-L2 IgV v54
FTVTVPKELYIVEQGSNVTLECNFDTGSHVNLGAITASLQKVENDASPHRERATLLEEQLPLGKASFLIPQVQVGDEGQYQCIIIYGDAWDYKYLTLK

SEQ ID NO: 1335 - protein, 98 aa, Artificial Sequence
  PD-L2 IgV v55
FTVTVPKELYVVEQGSNVTLECNFDTGSHVNLGAITASLQKVENDASPHRERATLLEEQLPLGKASFHIPQVQVRDEGQYRCIIIYGDAWDYKYLTLK

SEQ ID NO: 1336 - protein, 98 aa, Artificial Sequence
  PD-L2 IgV v56
FTVTVPKELYIVEQGSNVTLECNFDTGSHVNLGAITASLQKVENDTSPHRERATLLEEQLPLGKASFHIPQVQVGNEGQYRCIIIYGDAWDYKYLTLK

SEQ ID NO: 1337 - protein, 98 aa, Artificial Sequence
  PD-L2 IgV v57
FTVTVPKELYIVEQGSNVTLECNFDTGSHVNLGAITASLQKVENDASPHRERATLLEEQLPLGKASFHIPQVQVGDEGQYQCIIIYGDAWDYKYLTLK

SEQ ID NO: 1338 - protein, 98 aa, Artificial Sequence
  PD-L2 IgV v58
FTVTVPKELYIVEQGSNVTLECNFDTGSHVNLGAITASLQKVENDASPHRERATLLEEQLPLGKASFHIPQVQVRDEGQYRCIIIYGDAWDYKYLTLK

SEQ ID NO: 1339 - protein, 98 aa, Artificial Sequence
  PD-L2 IgV v60
FTVTVPKELYIVEQGSNVTLECDFDTGSHVNLGAITASLQKVENDTSPHRERATLLEEQLPLGKASFHIPQVQVRDEGQYRCIIIYGDAWDYKYLTLK

SEQ ID NO: 1340 - protein, 98 aa, Artificial Sequence
  PD-L2 IgV v61
FTVTVPKELYIVEQGSNVTLECNFDTGSHVNLGAVTASLQKVENDASPHRERATLLEEQLPLGKALFHIPQVQVRDEGQYQCIIIYGDAWDYKYLTLK

SEQ ID NO: 1341 - protein, 98 aa, Artificial Sequence
  PD-L2 IgV v62
FTVTVPKELYIIEQGSNVTLECNFDTGSHVNLGAITASLQKVENDASPHRERATLLEEQLPLGRALFHIPQVQVRDEGQYRCIIIYGDAWDYKYLTLK

SEQ ID NO: 1342 - protein, 98 aa, Artificial Sequence
  PD-L2 IgV v63
FTVTVPKELYIIEQGSNVTLECNFDTGSHVNPGAITASLQKVENDASPHRERATLLEEQLPLGKALFHISQVQVRDEGQYQCIIIYGDAWDYKYLTLK

SEQ ID NO: 1343 - protein, 98 aa, Artificial Sequence
  PD-L2 IgV v64
FTVTVPKELYIVEQGSNVTLECNFDTGSHVNLGAITASLQKVENDTSPHRERATLLEEQLPLGKASFHIPHVQVGDEGQYQCIITYGVAWDYKYLTLK

SEQ ID NO: 1344 - protein, 98 aa, Artificial Sequence
  PD-L2 IgV v65
FTVTVPKELYIIEQGSNVTLECNFDTGSHVNLGAITASLQKVENDASPHRERATLLEEQLPLGKALFHIPQVQVRDEGQYRCIIIYGDAWDYKYLTLK

SEQ ID NO: 1345 - protein, 98 aa, Artificial Sequence
  PD-L2 IgV v66
LTVTVPKELYIIEQGSNVTLECNFDTGSHVNLGAITASLQKVENEASPHRERATLLEEQLPLGKASFHIPHVQVGDEGQYRCIIIYGDAWDYKYLTLK

SEQ ID NO: 1346 - protein, 98 aa, Artificial Sequence
  PD-L2 IgV v67
FTVTVPKELYIVEQGSNVTLECNFDTGSHVNFGAITASLQKVENDASPHRERATLLEEQLPLGKASFHIPQVQVRDEGQYRCIIIYGDAWDYKYLTLK

SEQ ID NO: 1347 - protein, 98 aa, Artificial Sequence
  PD-L2 IgV v68
FTVTVPKELYIVEQGSNVTLECNFDTGSHVNLGAITASLQKVENDASPHRERATLLGEQLPLGKALFHIPQVQVRDEGQYRCIIIYGDAWDYKYLTLK

SEQ ID NO: 1348 - protein, 98 aa, Artificial Sequence
  PD-L2 IgV v69
FTVTVPKELYIIEQGSNVTLECSFDTGSHVNLGAITASLQKVENDASPHRERATLLEEQLPLGKASFHIPHVQVGDEGQYQCIIIYGDAWDYKYLTLK

SEQ ID NO: 1349 - protein, 98 aa, Artificial Sequence
  PD-L2 IgV v70
FTVTVPKELYIVEQGSNVTLECNFDTGSHVNLGAITASLQKVVNDASPHRERATLLEEQLPLGKASFHIPQVQVRDEGQYRCIIIYGDAWDYKYLTLK

SEQ ID NO: 1350 - protein, 98 aa, Artificial Sequence
  PD-L2 IgV v71
FTVTVPKELYIIEQGSDVTLECNFDTGSHVNLGAITASLQKVENDASPHRERATLLEEQLPLGKASFHIPHAQVGDEGQYQCIITYGDAWDYKYLTLK

SEQ ID NO: 1351 - protein, 98 aa, Artificial Sequence
  PD-L2 IgV v72
FTVTVPKELYIVEQGSNVTLECNFDTGSHVNLGAIAASLQKVDNDTCPHRERATLLEEQLPLGKALFHIPQVQVRDEGQYRCIIIYGDAWDYKYLTLK

SEQ ID NO: 1352 - protein, 98 aa, Artificial Sequence
  PD-L2 IgV v73
FTVTVPKELYIIEQGSNVTLECNFDTGSHVNHGAITASLQKVENDTSPHRERATLLEEQLPLGKALFHIPQVQVGDEGQYRCIIIYGDAWDYKYLTLK

SEQ ID NO: 1353 - protein, 98 aa, Artificial Sequence
  PD-L2 IgV v74
FTVTVPKELYIVEQGSNVTLECNFDTGSHVNLGAITASLQKVENDASPHRERATLLEEQLPLGKASFHIPHVQVGDEGQYQCIITYGVAWDYKYLTLK

SEQ ID NO: 1354 - protein, 98 aa, Artificial Sequence
  PD-L2 IgV v75
FTVTVPKELYIIEQGSNVTLECNFDTGSHVNLGAITAILQKVDNDTSPHRERATLLEEQLPLGKASFHIPHVQGGDEGQYRCIIIYGDAWDYKYLTLK

SEQ ID NO: 1355 - protein, 98 aa, Artificial Sequence
  PD-L2 IgV v76
FTVTVPKELYIIEQGSNVTLECNFDTGSHVNLGAITASLQKVENDASPHRERATLLEEQLPLGKALFHIPQVQVGDEGQYRCIIIYGDAWDYKYLTLK

SEQ ID NO: 1356 - protein, 98 aa, Artificial Sequence
  PD-L2 IgV v77
FTVTVPKELYIVEQGSNVTLECNFDTGSHVNLGAITASLQKVENDASPHRERATLLEEQLPLGKALFHIPHVQVGDEGQYRCIIIYGDAWDYKYLTLK

SEQ ID NO: 1357 - protein, 102 aa, Artificial Sequence
  PD-L2 IgV v1
LFTVTVPKELYIIEQGSNVTLECNFDTGSHVNLGAITASLQKVENDTSPHRERATLLEEQLPLGKASFHIPQVQVRDEGQYQCIIIYGVAWDYKYLTLKVKA

SEQ ID NO: 1358 - protein, 102 aa, Artificial Sequence
  PD-L2 IgV v2
LFTVTVPKELYIIEHGSNVTLECDFDTGSHVNLGAITASLQKVENDTSPHRERATLLEEQLPLGKASFHIPQVQVRDEGQYQCIIIYGVAWDYKYLTLKVKA

SEQ ID NO: 1359 - protein, 102 aa, Artificial Sequence
  PD-L2 IgV v3
LFTVTVPKELYIIEHGSNVTLECNFDTGSHVNLGAITASLQKVDNDTSPHRERATLLEEQLPLGKASFHIPQVQVRDEGQYQCIIIYGVAWDYKYLTLKVKA

SEQ ID NO: 1360 - protein, 102 aa, Artificial Sequence
  PD-L2 IgV v4
LFTVTVPKELYIIEHGSNVTLECNFDTGSHVNLGAITASLQKVENDTSPHRERATLLEEQLPLGKASFHIPQVQVRDEGQYQCIIIYGDAWDYKYLTLKVKA

SEQ ID NO: 1361 - protein, 102 aa, Artificial Sequence
  PD-L2 IgV v5
LFTVTVPKELYIIEHGSNVTLECNFDTGSHVNLGAITASLQKVENDTSPHRERATLLEEQLPLGKASFHIPQVQVRDEGQYRCIIIYGDAWDYKYLTLKVKA

SEQ ID NO: 1362 - protein, 102 aa, Artificial Sequence
  PD-L2 IgV v6
LFTVTVPKELYIIEHGSNVTLECNFDTGSHVNLGAITASLQKVENDTSPHRERATLLEGQLPLGKASFHIPQVQVRDEGQYRCIIIYGVAWDYKYLTLKVKA

SEQ ID NO: 1363 - protein, 102 aa, Artificial Sequence
  PD-L2 IgV v7
LFTVTVPKELYIIEHGSNVTLECNFDTGSHVNLGAITAILQKVENDTSPHRERATLLEEQLPLGKASFHIPQVQVRDEGQYQCIIIYGDAWDYKYLTLKVKA

SEQ ID NO: 1364 - protein, 102 aa, Artificial Sequence
  PD-L2 IgV v8
LFTVTVPKELYIIEHGSNVTLECNFDTGSHVNLGAITASLQKVENDTSPHRERATLLEEQLPLGKALFHIPQVQVRDEGQYQCIIIYGDAWDYKYLTLKVKA

SEQ ID NO: 1365 - protein, 102 aa, Artificial Sequence
  PD-L2 IgV v9
LFTVTVPKELYIIEHGSNVTLECNFDTGSHVNLGAITASLQKVENDTSPHRERATLLEEQLPLGKALFHIPQVQVRDEGQYQCIFIYGVAWDYKYLTLKVKA

SEQ ID NO: 1366 - protein, 102 aa, Artificial Sequence
  PD-L2 IgV v10
LFTVTVPKELYIIEHGSNVTLECNFDTGSHVNLGAITASLQKVENDTSPHRERATLLEEQLPLGKALFHIPQVQVRDEGQYQCIITYGVAWDYKYLTLKVKA

SEQ ID NO: 1367 - protein, 102 aa, Artificial Sequence
  PD-L2 IgV v11
LFTVTVPKELYIIEQGSNVTLECNFDTGSHVNLGAITASLQKVENDTSPHRERATLLEEQLPLGRASFHIPQVQVRDEGQYQCIIIYGVAWDYKYLTLKVKA

SEQ ID NO: 1368 - protein, 102 aa, Artificial Sequence
  PD-L2 IgV v12
LFTVTVPKELYIIEQGSNVTLECNFDTGSHVNLGAITASLQKVENDTSPHRERATLLEEQLPLGKASFHIPHVQVRDEGQYQCIIIYGDAWDYKYLTLKVKA

SEQ ID NO: 1369 - protein, 102 aa, Artificial Sequence
  PD-L2 IgV v13
LFTVTVPKELYIIEQGSNVTLECNFDTGSHVNLGAITASLQKVENDTSPHRERATLLEEQLPLGKALFHIPQVQVGDEGQYQCIIIYGVAWDYKYLTLKVKA

SEQ ID NO: 1370 - protein, 102 aa, Artificial Sequence
  PD-L2 IgV v14
LFTVTVPKELYIIEQGSNVTLECNFDTGSHVNLGAITASLQKVENDTSPHRERATLLEEQLPLGKASFHIPQVQVGDEGQYQCIFIYGVAWDYKYLTLKVKA

SEQ ID NO: 1371 - protein, 102 aa, Artificial Sequence
  PD-L2 IgV v15
LFTVTVPKELYIIEQGSNVTLECNFDTGSHVNLGAITASLQKVENDASPHRERATLLEEQLPLGKASFHIPQVQVRDEGQYRCIIIYGVAWDYKYLTLKVKA

SEQ ID NO: 1372 - protein, 102 aa, Artificial Sequence
  PD-L2 IgV v16
LFTVTVPKELYIIEQGSNVTLECNFDTGSHVNLGAITASLQKVENDTSPHRERATLLEEQLPLGKASFHIPQVQVRDEGQYRCIIIYGDAWDYKYLTLKVKA

SEQ ID NO: 1373 - protein, 102 aa, Artificial Sequence
  PD-L2 IgV v17
LFTVTVPKELYIIEQGSNVTLESNFDTGSHVNLGAITASLQKVENDTSPHRERATLLEEQLPLGKASFHIPQVQVRDEGQYQCIITYGVAWDYKYLTLKVKA

SEQ ID NO: 1374 - protein, 102 aa, Artificial Sequence
  PD-L2 IgV v18
LFTVTVPKELYIIEQGSNVTLECNFDTGSHVNLGAITAILQKVENDTSPHRERATLLEEQLPLGKASFHIPQVQVRDEGQYQCIITYGVAWDYKYLTLKVKA

SEQ ID NO: 1375 - protein, 102 aa, Artificial Sequence; identical to SEQ ID NO: 1370
  PD-L2 IgV v19

SEQ ID NO: 1376 - protein, 102 aa, Artificial Sequence
  PD-L2 IgV v20
LFTVTVPKELYIIEHGSNVTLECNFDTGSHVNLGAITASLQKVDNDTSPHRERATLLEEQLPLGKASFHIPQVQVRDEGQYQCIIIYGDARDYKYLTLKVKA

SEQ ID NO: 1377 - protein, 102 aa, Artificial Sequence
  PD-L2 IgV v21
LFTVTVPKELYIVEHGSNVTLECNFDTGSHVNLGAITASLQKVENDTSPHRERATLLEEQLPLGKALFHIPQVQVRDEGQYQCIIIYGDAWDYKYLTLKVKA

SEQ ID NO: 1378 - protein, 102 aa, Artificial Sequence
  PD-L2 IgV v22
LFTVTVPKELYIIEQGSNVTLECNFDTGSHVNLGAITASLQKVENDTSPHRERATLLEEQLPLGKALFHIPQVQVRDEGQYQCIITYGVAWDYKYLTLKVKA

SEQ ID NO: 1379 - protein, 102 aa, Artificial Sequence
  PD-L2 IgV v23
LFTVTVPKELYIVEQGSNVTLECNFDTGSHVNLGAITASLQKVENDTSPHRERATLLEEQLPLGKALFHIPQVQVRDEGQYQCIITYGVAWDYKYLTLKVKA

SEQ ID NO: 1380 - protein, 102 aa, Artificial Sequence
  PD-L2 IgV v24
LFTVTVPKELYIVEQGSNVTLECNFDTGSHVNLGAITASLQKVDNDTSPHRERATLLEEQLPLGKASFHIPQVQVRDEGQYQCIIIYGDAWDYKYLTLKVKA

SEQ ID NO: 1381 - protein, 102 aa, Artificial Sequence
  PD-L2 IgV v25
LFTVTVPKELYIVEHGSNVTLECNFDTGSHVNLGAITAILQKVDNDTSPHRERATLLEEQLPLGKASFHIPQVQVRDEGQYRCIIIYGDAWDYKYLTLKVKA

SEQ ID NO: 1382 - protein, 102 aa, Artificial Sequence
  PD-L2 IgV v26
LFTVTVPKELYIVEHGSNVTLECNFDTGSHVNLGAITASLQKVDNDTSPHRERATLLEEQLPLGKASFHIPQVQVRDEGQYRCIIIYGDAWDYKYLTLKVKA

SEQ ID NO: 1383 - protein, 102 aa, Artificial Sequence
  PD-L2 IgV v27
LFTVTVPKELYIVEHGSNVTLECNFDTGSHVNLGAITASLQKVENDTSPHRERATLLEEQLPLGKASFHIPHVQVGDEGQYQCIITYGVAWDYKYLTLKVKA

SEQ ID NO: 1384 - protein, 102 aa, Artificial Sequence
  PD-L2 IgV v28
LFTVTVPKELYIVEQGSNVTLECNFDTGSHVNLGAITASLQKVENDTSPHRERATLLEEQLPLGKASFHIPQVQVGDEGQYQCIFIYGVAWDYKYLTLKVKA

SEQ ID NO: 1385 - protein, 102 aa, Artificial Sequence
  PD-L2 IgV v29
LFTVTVPKELYIIEQGSNVTLECNFDTGSHVNLGAITAILQKVENDTSPHRERATLLEEQLPLGKASFHIPQVQVGDEGQYQCIIIYGDAWDYKYLTLKVKA

SEQ ID NO: 1386 - protein, 102 aa, Artificial Sequence
  PD-L2 IgV v30
LFTVTVPKELYIIEQGSNVTLECNFDTGSHVNLGAITASLQKVENDTSPHRERATLLEEQLPLGKALFHIPQVQVGDEGQYQCIFIYGVAWDYKYLTLKVKA

SEQ ID NO: 1387 - protein, 102 aa, Artificial Sequence
  PD-L2 IgV v31
LFTVTVPKELYIIEQGSNVTLECNFDTGSHVNLGAITASLQKVENDASPHRERATLLEEQLPLGKASFHIPHVQVGDEGQYQCIITYGVAWDYKYLTLKVKA

SEQ ID NO: 1388 - protein, 102 aa, Artificial Sequence
  PD-L2 IgV v32
LFTVTVPKELYIIEQGSNVTLECNFDTGSHVNLGAITASLQKVENDASPHRERATLLEEQLPLGKASFHIPHVQVGDEGQYQCIIIYGVAWDYKYLTLKVKA

SEQ ID NO: 1389 - protein, 102 aa, Artificial Sequence
  PD-L2 IgV v33
LFTVTVPKELYIVEQGSNVTLECNFDTGSHVNLGAITASLQKVENDASPHRERATLLEEQLPLGKASFHIPHVQVGDEGQYQCIIIYGVAWDYKYLTLKVKA

SEQ ID NO: 1390 - protein, 102 aa, Artificial Sequence
  PD-L2 IgV v34
LFTVTVPKELYIIEQGSNVTLECNFDTGSHVNLGAITASLQKVDNDTSPHRERATLLEEQLPLGKASFHIPQVQVGDEGQYQCIFIYGVAWDYKYLTLKVKA

SEQ ID NO: 1391 - protein, 102 aa, Artificial Sequence
  PD-L2 IgV v35
LFTVTVPKELYIIEQGSNVTLECNFDTGSHVNLGAITAILQKVENDTSPHRERATLLEEQLPLGKALFHIPQVQVRDEGQYQCIIIYGDAWDYKYLTLKVKA

SEQ ID NO: 1392 - protein, 102 aa, Artificial Sequence
  PD-L2 IgV v36
LFTVTVPKELYIIEQGSNVTLECNFDTGSHVDLGAITASLQKVENDTSPHRERATLLEEQLPLGKALFHIPQVQVRDEGQYQCIIIYGDAWDYKYLTLKVKA

SEQ ID NO: 1393 - protein, 102 aa, Artificial Sequence
  PD-L2 IgV v37
LFTVTVPKELYIIEHGSNVTLECNFDTGSHVDLGAITASLQKVENDTSPHRERATLLEEQLPLGKALFHIPQVQVRDEGQYQCIIIYGDAWDYKYLTLKVKA

SEQ ID NO: 1394 - protein, 102 aa, Artificial Sequence
  PD-L2 IgV v38
LFTVTVPKELYIIEQGSNVTLECNFDTGSHVNLGAITASLQKVENDTSPHRERATLLEEQLPLGKALFHIPHVQVGDEGQYQCIIIYGDAWDYKYLTLKVKA

SEQ ID NO: 1395 - protein, 102 aa, Artificial Sequence
  PD-L2 IgV v39
LFTVTVPKELYIIEQGSNVTLECNFDTGSHVNLGAITASLQKVENDTSPHRERATLLEEQLPLGKASFHIPHVRVGDEGQYQCIITYGVAWDYKYLTLKVKA

SEQ ID NO: 1396 - protein, 102 aa, Artificial Sequence
  PD-L2 IgV v40
LFTVTVPKELYIIEHGSNVTLECNFDTVSHVNLGAITASLQKVENDTSPHRERATLLEEQLPLGKASFHIPHVQVGDEGQYQCIITYGVAWDYKYLTLKVKA

SEQ ID NO: 1397 - protein, 102 aa, Artificial Sequence
  PD-L2 IgV v41
LFTVTVPKELYIVEQGSNVTLECNFDTGSHVNLGAITAILQKVDNDTSPHRERATLLEEQLPLGKALFHIPQVQVRDEGQYQCIIIYGVAWDYKYLTLKVKA

SEQ ID NO: 1398 - protein, 102 aa, Artificial Sequence
  PD-L2 IgV v42
LFTVTVPKELYIIEHGSNVTLECNFDTGSHVNLGAITASLQKVDNDTSPHRERATLLEEQLPLGKALFHIPHVQVRDEGQYRCIIIYGDAWDYKYLTLKVKA

SEQ ID NO: 1399 - protein, 102 aa, Artificial Sequence
  PD-L2 IgV v43
LFTVTVPKELYIIEQGSNVTLECNFDTGSHVNLGAITASLQKVENDTSPHRERATLLEEQLPLGKASFHIPQVQVRDEGQYQCIIIYGDAWDYKYLTLKVKA

SEQ ID NO: 1400 - protein, 102 aa, Artificial Sequence
  PD-L2 IgV v44
LFTVTVPKELYIIEQGSNVTLECNFDTGSHVNLGAITASLQKVENDASPHRERATLLEEQLPLGKASFHIPQVQVRDEGQYQCIIIYGVAWDYKYLTLKVKA

SEQ ID NO: 1401 - protein, 102 aa, Artificial Sequence
  PD-L2 IgV v45
LFTVTVPKELYIVEQGSNVTLECNFDTGSHVNLGAITASLQKVENDTSPHRERATLLEEQLPLGKASFHIPQVQVRDEGQYRCIIIYGVAWDYKYLTLKVKA

SEQ ID NO: 1402 - protein, 102 aa, Artificial Sequence
  PD-L2 IgV v46
LFTVTVPKELYIVEQGSNVTLECNFDTGSHVNLGAITASLQKVENDTSPHRERATLLEEQLPLGKASFHIPQVQVRDEGQYQCIIIYGDAWDYKYLTLKVKA

SEQ ID NO: 1403 - protein, 102 aa, Artificial Sequence
  PD-L2 IgV v47
LFTVTVPKELYIVEHGSNVTLECNFDTGSHVNLGAITASLQKVENDTSPHRERATLLEEQLPLGKALFHIPQVQVRDEGQYRCIIIYGDAWDYKYLTLKVKA

SEQ ID NO: 1404 - protein, 102 aa, Artificial Sequence
  PD-L2 IgV v48
LFTVTVPKELYIVEQGSNVTLECNFDTGSHVNLGAITASLQKVENDTSPHRERATLLEEQLPLGKASFHIPQVQVRDEGQYRCIIIYGDAWDYKYLTLKVKA

SEQ ID NO: 1405 - protein, 102 aa, Artificial Sequence
  PD-L2 IgV v49
LFTVTVPKELYIIEQGSNVTLECNFDTGSHMNLGAITASLQKVENDTSPHRERATLLEEQLPLGKALFHIPQVQVRDEGQYRCIIIYGDAWDYKYLTLKVKA

SEQ ID NO: 1406 - protein, 102 aa, Artificial Sequence
  PD-L2 IgV v50
LFTVTVPKELYIVEQGSNVTLECNFDTGSHVNLGAITASLQKVENDASPHRERATLLEEQLPLGKASFHIPQVQVRDEGQYRCIIIYGVAWDYKYLTLKVKA

SEQ ID NO: 1407 - protein, 102 aa, Artificial Sequence
  PD-L2 IgV v51
LFTVTVPKELYIVEQGSNVTLECNFDTGSHANLGAITASLQKVESDTSPHRERATLLEEQLPLGKASFHIPQVQVRDEGQYRCIIIYGDAWDYKYLTLKVKA

SEQ ID NO: 1408 - protein, 102 aa, Artificial Sequence
  PD-L2 IgV v52
  VARIANT (65)..(65): Xaa is unknown
LFTVTVPKELYIVEHGSNVALECNFDTGSHVNLGAITASLQKVENDASPHRERATLLEEQLPLGXASFHIPQVQVRDEGQYRCIIIYGDAWDYKYLTLKVKA

SEQ ID NO: 1409 - protein, 102 aa, Artificial Sequence
  PD-L2 IgV v53
LFTVTVPKELYIIEQGSNVTLECNFDTGSHVNLGAITASLQKVENDASPHRERATLLEEQLPLGKASFLIPQVQVRDEGQYRCIIIYGDAWDYKYLTLKVKA

SEQ ID NO: 1410 - protein, 102 aa, Artificial Sequence
  PD-L2 IgV v54
LFTVTVPKELYIVEQGSNVTLECNFDTGSHVNLGAITASLQKVENDASPHRERATLLEEQLPLGKASFLIPQVQVGDEGQYQCIIIYGDAWDYKYLTLKVKA

SEQ ID NO: 1411 - protein, 102 aa, Artificial Sequence
  PD-L2 IgV v55
LFTVTVPKELYVVEQGSNVTLECNFDTGSHVNLGAITASLQKVENDASPHRERATLLEEQLPLGKASFHIPQVQVRDEGQYRCIIIYGDAWDYKYLTLKVKA

SEQ ID NO: 1412 - protein, 102 aa, Artificial Sequence
  PD-L2 IgV v56
LFTVTVPKELYIVEQGSNVTLECNFDTGSHVNLGAITASLQKVENDTSPHRERATLLEEQLPLGKASFHIPQVQVGNEGQYRCIIIYGDAWDYKYLTLKVKA

SEQ ID NO: 1413 - protein, 102 aa, Artificial Sequence
  PD-L2 IgV v57
LFTVTVPKELYIVEQGSNVTLECNFDTGSHVNLGAITASLQKVENDASPHRERATLLEEQLPLGKASFHIPQVQVGDEGQYQCIIIYGDAWDYKYLTLKVKA

SEQ ID NO: 1414 - protein, 102 aa, Artificial Sequence
  PD-L2 IgV v58
LFTVTVPKELYIVEQGSNVTLECNFDTGSHVNLGAITASLQKVENDASPHRERATLLEEQLPLGKASFHIPQVQVRDEGQYRCIIIYGDAWDYKYLTLKVKA

SEQ ID NO: 1415 - protein, 102 aa, Artificial Sequence
  PD-L2 IgV v60
LFTVTVPKELYIVEQGSNVTLECDFDTGSHVNLGAITASLQKVENDTSPHRERATLLEEQLPLGKASFHIPQVQVRDEGQYRCIIIYGDAWDYKYLTLKVKA

SEQ ID NO: 1416 - protein, 102 aa, Artificial Sequence
  PD-L2 IgV v61
LFTVTVPKELYIVEQGSNVTLECNFDTGSHVNLGAVTASLQKVENDASPHRERATLLEEQLPLGKALFHIPQVQVRDEGQYQCIIIYGDAWDYKYLTLKVKA

SEQ ID NO: 1417 - protein, 102 aa, Artificial Sequence
  PD-L2 IgV v62
LFTVTVPKELYIIEQGSNVTLECNFDTGSHVNLGAITASLQKVENDASPHRERATLLEEQLPLGRALFHIPQVQVRDEGQYRCIIIYGDAWDYKYLTLKVKA

SEQ ID NO: 1418 - protein, 102 aa, Artificial Sequence
  PD-L2 IgV v63
LFTVTVPKELYIIEQGSNVTLECNFDTGSHVNPGAITASLQKVENDASPHRERATLLEEQLPLGKALFHISQVQVRDEGQYQCIIIYGDAWDYKYLTLKVKA

SEQ ID NO: 1419 - protein, 102 aa, Artificial Sequence
  PD-L2 IgV v64
LFTVTVPKELYIVEQGSNVTLECNFDTGSHVNLGAITASLQKVENDTSPHRERATLLEEQLPLGKASFHIPHVQVGDEGQYQCIITYGVAWDYKYLTLKVKA

SEQ ID NO: 1420 - protein, 102 aa, Artificial Sequence
  PD-L2 IgV v65
LFTVTVPKELYIIEQGSNVTLECNFDTGSHVNLGAITASLQKVENDASPHRERATLLEEQLPLGKALFHIPQVQVRDEGQYRCIIIYGDAWDYKYLTLKVKA

SEQ ID NO: 1421 - protein, 102 aa, Artificial Sequence
  PD-L2 IgV v66
LLTVTVPKELYIIEQGSNVTLECNFDTGSHVNLGAITASLQKVENEASPHRERATLLEEQLPLGKASFHIPHVQVGDEGQYRCIIIYGDAWDYKYLTLKVKA

SEQ ID NO: 1422 - protein, 102 aa, Artificial Sequence
  PD-L2 IgV v67
LFTVTVPKELYIVEQGSNVTLECNFDTGSHVNFGAITASLQKVENDASPHRERATLLEEQLPLGKASFHIPQVQVRDEGQYRCIIIYGDAWDYKYLTLKVKA

SEQ ID NO: 1423 - protein, 102 aa, Artificial Sequence
  PD-L2 IgV v68
LFTVTVPKELYIVEQGSNVTLECNFDTGSHVNLGAITASLQKVENDASPHRERATLLGEQLPLGKALFHIPQVQVRDEGQYRCIIIYGDAWDYKYLTLKVKA

SEQ ID NO: 1424 - protein, 102 aa, Artificial Sequence
  PD-L2 IgV v69
LFTVTVPKELYIIEQGSNVTLECSFDTGSHVNLGAITASLQKVENDASPHRERATLLEEQLPLGKASFHIPHVQVGDEGQYQCIIIYGDAWDYKYLTLKVKA

SEQ ID NO: 1425 - protein, 102 aa, Artificial Sequence
  PD-L2 IgV v70
LFTVTVPKELYIVEQGSNVTLECNFDTGSHVNLGAITASLQKVVNDASPHRERATLLEEQLPLGKASFHIPQVQVRDEGQYRCIIIYGDAWDYKYLTLKVKA

SEQ ID NO: 1426 - protein, 102 aa, Artificial Sequence
  PD-L2 IgV v71
LFTVTVPKELYIIEQGSDVTLECNFDTGSHVNLGAITASLQKVENDASPHRERATLLEEQLPLGKASFHIPHAQVGDEGQYQCIITYGDAWDYKYLTLKVKA

SEQ ID NO: 1427 - protein, 102 aa, Artificial Sequence
  PD-L2 IgV v72
LFTVTVPKELYIVEQGSNVTLECNFDTGSHVNLGAIAASLQKVDNDTCPHRERATLLEEQLPLGKALFHIPQVQVRDEGQYRCIIIYGDAWDYKYLTLKVKA

SEQ ID NO: 1428 - protein, 102 aa, Artificial Sequence
  PD-L2 IgV v73
LFTVTVPKELYIIEQGSNVTLECNFDTGSHVNHGAITASLQKVENDTSPHRERATLLEEQLPLGKALFHIPQVQVGDEGQYRCIIIYGDAWDYKYLTLKVKA

SEQ ID NO: 1429 - protein, 102 aa, Artificial Sequence
  PD-L2 IgV v74
LFTVTVPKELYIVEQGSNVTLECNFDTGSHVNLGAITASLQKVENDASPHRERATLLEEQLPLGKASFHIPHVQVGDEGQYQCIITYGVAWDYKYLTLKVKA

SEQ ID NO: 1430 - protein, 102 aa, Artificial Sequence
  PD-L2 IgV v75
LFTVTVPKELYIIEQGSNVTLECNFDTGSHVNLGAITAILQKVDNDTSPHRERATLLEEQLPLGKASFHIPHVQGGDEGQYRCIIIYGDAWDYKYLTLKVKA

SEQ ID NO: 1431 - protein, 102 aa, Artificial Sequence
  PD-L2 IgV v76
LFTVTVPKELYIIEQGSNVTLECNFDTGSHVNLGAITASLQKVENDASPHRERATLLEEQLPLGKALFHIPQVQVGDEGQYRCIIIYGDAWDYKYLTLKVKA

SEQ ID NO: 1432 - protein, 102 aa, Artificial Sequence
  PD-L2 IgV v77
LFTVTVPKELYIVEQGSNVTLECNFDTGSHVNLGAITASLQKVENDASPHRERATLLEEQLPLGKALFHIPHVQVGDEGQYRCIIIYGDAWDYKYLTLKVKA

SEQ ID NO: 1433 - protein, 329 aa, Artificial sequence
  CD112 v89 ECD
QDVRVQVLPEVRGQLGGTVELPCHLLPPVPGLHISLVTWQRPDAPANHQNVAAFHPKMGPSFPSPKPGSERLSFVSAKQSTGKDTEAELQDATLALHGLTVEDEGNYTCEFVTFPKGTVRGMTWLRVIAKPKNQAEAQKVTFSQDPTTVALCISKEGRPPARISWLSSLDWEAKETQVSGTLAGTVTVTSRFTLVPSGRADGVTVTCKVEHESFEEPALIPVTLSVRYPPEVSISGYDDNWYLGRTDATLSCDVRSNPEPTGYDWSTTSGTFPTSAVAQGSQLVIHAVDSLFNTTFVCTVTNAVGMGRAEQVIFVRETPNTAGAGATGG

SEQ ID NO: 1434 - protein, 329 aa, Artificial sequence
  CD112 v90 ECD
QDVRVQVLPEVRGQLGGTVELPCHLLPPMPGLHISLVTWQRPDAPANHQNVAAFHPKMGPSFPSPKPGSERLSFVSAKQSTGQDTEAELQDATLALHGLTVEDEGIYTCEFATFPKGFVRGMTWLRVIAKPKNQAEAQKVTFSQDPTTVALCISKEGRPPARISWLSSLDWEAKETQVSGTLAGTVTVTSRFTLVPSGRADGVTVTCKVEHESFEEPALIPVTLSVRYPPEVSISGYDDNWYLGRTDATLSCDVRSNPEPTGYDWSTTSGTFPTSAVAQGSQLVIHAVDSLFNTTFVCTVTNAVGMGRAEQVIFVRETPNTAGAGATGG

SEQ ID NO: 1435 - protein, 329 aa, Artificial sequence
  CD112 v91 ECD
QDVRVQVLPEVRGQLGGTVELPCHLLPPVPGLHISLVTWQRPDAPTNHQNVAAFHPKMGPSFPSPKPGSERLSFVSAKQSTGQDTEAELQDATLALHGLTVEDEGNYTCEFVTFPKGSVRGMTWLRVIAKPKNQAEAQKVTFSQDPTTVALCISKEGRPPARISWLSSLDWEAKETQVSGTLAGTVTVTSRFTLVPSGRADGVTVTCKVEHESFEEPALIPVTLSVRYPPEVSISGYDDNWYLGRTDATLSCDVRSNPEPTGYDWSTTSGTFPTSAVAQGSQLVIHAVDSLFNTTFVCTVTNAVGMGRAEQVIFVRETPNTAGAGATGG

SEQ ID NO: 1436 - protein, 329 aa, Artificial sequence
  CD112 v92 ECD
QDVRVQVLPEVRGQLGGTVELPCHLLPPVPGLHISLVTWQRPDAPANHQNVAAFHPKMGPSFPSPKPGSERLSFVSAKRSTGQDTEAELQDATLALHGLTVEDEGNYTCEFATFPKGFVRGMTWLRVIAKPKNQAEAQKVTFSQDPTTVALCISKEGRPPARISWLSSLDWEAKETQVSGTLAGTVTVTSRFTLVPSGRADGVTVTCKVEHESFEEPALIPVTLSVRYPPEVSISGYDDNWYLGRTDATLSCDVRSNPEPTGYDWSTTSGTFPTSAVAQGSQLVIHAVDSLFNTTFVCTVTNAVGMGRAEQVIFVRETPNTAGAGATGG

SEQ ID NO: 1437 - protein, 329 aa, Artificial sequence
  CD112 v93 ECD
QDVRVQVLPEVRGQLGGTVELPCHLLPPVPGLHISLVTWQRPDAPAKHQNVAAFHPKMGPSFPSPKPGSERLSLVSAKQSTGQDTEAELQDATLALHGLTVEDEGNYTCEFATFPKGFVRGMTWLRVIAKPKNQAEAQKVTFSQDPTTVALCISKEGRPPARISWLSSLDWEAKETQVSGTLAGTVTVTSRFTLVPSGRADGVTVTCKVEHESFEEPALIPVTLSVRYPPEVSISGYDDNWYLGRTDATLSCDVRSNPEPTGYDWSTTSGTFPTSAVAQGSQLVIHAVDSLFNTTFVCTVTNAVGMGRAEQVIFVRETPNTAGAGATGG

SEQ ID NO: 1438 - protein, 329 aa, Artificial sequence
  CD112 v94 ECD
QDVRVQVLPEVWGQLGGTVELPCHLLPPVPGLYISLVTWQRPDAPANHQNVAAFHPKMGPSFPSPKPGSERLSFVSAKQSTGQDTEAELQDATLALHGLTMEDEGIYTCEFATFPKGYVRGMTWLRVIAKPKNQAEAQKVTFSQDPTTVALCISKEGRPPARISWLSSLDWEAKETQVSGTLAGTVTVTSRFTLVPSGRADGVTVTCKVEHESFEEPALIPVTLSVRYPPEVSISGYDDNWYLGRTDATLSCDVRSNPEPTGYDWSTTSGTFPTSAVAQGSQLVIHAVDSLFNTTFVCTVTNAVGMGRAEQVIFVRETPNTAGAGATGG

SEQ ID NO: 1439 - protein, 329 aa, Artificial sequence
  CD112 v95 ECD
QDVRVQVLPEVRGQLGGTVELPCHLLPPVPGLYISLVTWQRPDAPTNHQNVAAFHPKMGPSFPSPKPGSERLSFVSAKQSTGQDTEAELQDATLALHGLTAEDEGIYTCEFATFPKGYVRGMTWLRVIAKPKNQAEAQKVTFSQDPTTVALCISKEGRPPARISWLSSLDWEAKETQVSGTLAGTVTVTSRFTLVPSGRADGVTVTCKVEHESFEEPALIPVTLSVRYPPEVSISGYDDNWYLGRTDATLSCDVRSNPEPTGYDWSTTSGTFPTSAVAQGSQLVIHAVDSLFNTTFVCTVTNAVGMGRAEQVIFVRETPNTAGAGATGG

SEQ ID NO: 1440 - protein, 329 aa, Artificial sequence
  CD112 v96 ECD
QDVRVQVLPEVRGQLGGTVELPCHLLPPVPGLYISLVTWQRPDAPANHQNVAAFHPKMGPSFPSPKPGSERLSFVSAKQSTGQDTEAELQDATLALHGLTVEDEGYYTCEFVTFPKGTVRGMTWLRVIAKPKNQAEAQKVTFSQDPTTVALCISKEGRPPARISWLSSLDWEAKETQVSGTLAGTVTVTSRFTLVPSGRADGVTVTCKVEHESFEEPALIPVTLSVRYPPEVSISGYDDNWYLGRTDATLSCDVRSNPEPTGYDWSTTSGTFPTSAVAQGSQLVIHAVDSLFNTTFVCTVTNAVGMGRAEQVIFVRETPNTAGAGATGG

SEQ ID NO: 1441 - protein, 329 aa, Artificial sequence
  CD112 v97 ECD
QDVRVQVLPEVRGQLGGTVELPCHLLPPVPGLYISLVTWQRPDAPANHQNVAAFHPKMGPSFPSPKPGSERLSFVPAKQSIGQDTEAELQDATLALHGLTMEDEGYYTCEFVTFPKGFVRGMTWLRVIAKPKNQAEAQKVTFSQDPTTVALCISKEGRPPARISWLSSLDWEAKETQVSGTLAGTVTVTSRFTLVPSGRADGVTVTCKVEHESFEEPALIPVTLSVRYPPEVSISGYDDNWYLGRTDATLSCDVRSNPEPTGYDWSTTSGTFPTSAVAQGSQLVIHAVDSLFNTTFVCTVTNAVGMGRAEQVIFVRETPNTAGAGATGG

SEQ ID NO: 1442 - protein, 329 aa, Artificial sequence
  CD112 v98 ECD
QDVRVQVLREVRGQLGGTVEVLCHLLPPVPGLYMSLVTWQRPDAPANHQNVAAFHPKMGPSFPSPKPGFERLSLVSAKQSTGQDTEVELQDATLALHGLTVEDEGNYTCEFVTFPKGSVRGMTWARVIAKPKNQAEAQKVTFSQDPTTVALCISKEGRPPARISWLSSLDWEAKETQVSGTLAGTVTVTSRFTLVPSGRADGVTVTCKVEHESFEEPALIPVTLSVRYPPEVSISGYDDNWYLGRTDATLSCDVRSNPEPTGYDWSTTSGTFPTSAVAQGSQLVIHAVDSLFNTTFVCTVTNAVGMGRAEQVIFVRETPNTAGAGATGG

SEQ ID NO: 1443 - protein, 329 aa, Artificial sequence
  CD112 v99 ECD
QDVRVQVLPEVRGQLGGTVELPCHLLPPVPGLHISLVTWQRPDAPANHQNVAAFHPKMGPSFPSPKPGSERLSFVSAKQSTGQDTEAELQDATLALHGLTMEDEGNYTCEFVTFPKGSVRGMTWLRVIAKPKNQAEAQKVTFSQDPTTVALCISKEGRPPARISWLSSLDWEAKETQVSGTLAGTVTVTSRFTLVPSGRADGVTVTCKVEHESFEEPALIPVTLSVRYPPEVSISGYDDNWYLGRTDATLSCDVRSNPEPTGYDWSTTSGTFPTSAVAQGSQLVIHAVDSLFNTTFVCTVTNAVGMGRAEQVIFVRETPNTAGAGATGG

SEQ ID NO: 1444 - protein, 329 aa, Artificial sequence
  CD112 v100 ECD
QDVRVQVLPEVRGQLGGTVELPCHLLPPAPGPYISLVTWQRPDAPANHQNVAAFHPKMGPSFPSPKPGSERLSFVSAKQSTGQDTEAELQDATLALHGLTVEDEGNYTCEFATFPKGFVRGMTWLRVIAKPKNQAEAQKVTFSQDPTTVALCISKEGRPPARISWLSSLDWEAKETQVSGTLAGTVTVTSRFTLVPSGRADGVTVTCKVEHESFEEPALIPVTLSVRYPPEVSISGYDDNWYLGRTDATLSCDVRSNPEPTGYDWSTTSGTFPTSAVAQGSQLVIHAVDSLFNTTFVCTVTNAVGMGRAEQVIFVRETPNTAGAGATGG

SEQ ID NO: 1445 - protein, 329 aa, Artificial sequence
  CD112 v101 ECD
QDVRVQVLPEVRGQLGGTVELPCHLLPPVPGLHISLVTWQRPDAPANHQNVAAFHPKMGPSFPSPKPGSERLSFVSAKQSTGQDTEAELQDATLALHGLTMEDEGIYTCEFVTFPKGSVRGMTWLRVIAKPKNQAEAQKVTFSQDPTTVALCISKEGRPPARISWLSSLDWEAKETQVSGTLAGTVTVTSRFTLVPSGRADGVTVTCKVEHESFEEPALIPVTLSVRYPPEVSISGYDDNWYLGRTDATLSCDVRSNPEPTGYDWSTTSGTFPTSAVAQGSQLVIHAVDSLFNTTFVCTVTNAVGMGRAEQVIFVRETPNTAGAGATGG

SEQ ID NO: 1446 - protein, 329 aa, Artificial sequence
  CD112 v102 ECD
QDVRVQVLPEVWGQLGGTVELPCHLLPPVPGLHISLVTWQRPDAPAKHQNVAAFHPKMGPSFPSPKPGSERLSFVSAKRSTGQDTEAELQDATLALHGLTVEDEGNYTCEFATFPKGYVRGMTWLRVIAKPKNQAEAQKVTFSQDPTTVALCISKEGRPPARISWLSSLDWEAKETQVSGTLAGTVTVTSRFTLVPSGRADGVTVTCKVEHESFEEPALIPVTLSVRYPPEVSISGYDDNWYLGRTDATLSCDVRSNPEPTGYDWSTTSGTFPTSAVAQGSQLVIHAVDSLFNTTFVCTVTNAVGMGRAEQVIFVRETPNTAGAGATGG

SEQ ID NO: 1447 - protein, 329 aa, Artificial sequence
  CD112 v103 ECD
QDVRVQVLPEVRGQLGGTVELPCHLLPPVPGLHISLVTWQRPDAPTNHQNVAAFHPKMGPSFPSPKPGSERLSFVSAKQSTGQDTEAELQDATLALHGLTVEDEGNYTCEFVTFPKGTVRGMTWLRVIAKPKNQAEAQKVTFSQDPTTVALCISKEGRPPARISWLSSLDWEAKETQVSGTLAGTVTVTSRFTLVPSGRADGVTVTCKVEHESFEEPALIPVTLSVRYPPEVSISGYDDNWYLGRTDATLSCDVRSNPEPTGYDWSTTSGTFPTSAVAQGSQLVIHAVDSLFNTTFVCTVTNAVGMGRAEQVIFVRETPNTAGAGATGG

SEQ ID NO: 1448 - protein, 329 aa, Artificial sequence
  CD112 v104 ECD
QDVRVQVLPEVRGQLGGTVELPCHLLPPVPGLHISLVTWQRPDAPANHQNVAAFHPKMGPSFPSPKPGSERLSFVSAKQSTGQDTEAELQDATLALHGLTVEDEGNYTCEFVTLPKGTVRGMTWLRVIAKPKNQAEAQKVTFSQDPTTVALCISKEGRPPARISWLSSLDWEAKETQVSGTLAGTVTVTSRFTLVPSGRADGVTVTCKVEHESFEEPALIPVTLSVRYPPEVSISGYDDNWYLGRTDATLSCDVRSNPEPTGYDWSTTSGTFPTSAVAQGSQLVIHAVDSLFNTTFVCTVTNAVGMGRAEQVIFVRETPNTAGAGATGG

SEQ ID NO: 1449 - protein, 329 aa, Artificial sequence
  CD112 v105 ECD
QDVRVQVLPEVRGQLGGTVELPCHLLPPVPGLHISLVAWQRPDAPTNHQNVAAFHPKMGPSFPSPKPGSERLSFVSAKQSTGQDTEAELQDATLALHGLTMEDEGNYTCEFVTFPKGSVRGMTWLRVIAKPKNQAEAQKVTFSQDPTTVALCISKEGRPPARISWLSSLDWEAKETQVSGTLAGTVTVTSRFTLVPSGRADGVTVTCKVEHESFEEPALIPVTLSVRYPPEVSISGYDDNWYLGRTDATLSCDVRSNPEPTGYDWSTTSGTFPTSAVAQGSQLVIHAVDSLFNTTFVCTVTNAVGMGRAEQVIFVRETPNTAGAGATGG

SEQ ID NO: 1450 - protein, 329 aa, Artificial sequence
  CD112 v106 ECD
QDVRVQVLPEVRGQLGGTVELPCHLLPSVPGLHISLVTWQRPDAPANHQNVAAFHPKMGPSFPSPKPGPERLSFVSAKQSTGQDTEAELQDATLALHGLTVEDEGIYTCEFVTFPKGYVRGMTWLRVIAKPKNQAEAQKVTFSQDPTTVALCISKEGRPPARISWLSSLDWEAKETQVSGTLAGTVTVTSRFTLVPSGRADGVTVTCKVEHESFEEPALIPVTLSVRYPPEVSISGYDDNWYLGRTDATLSCDVRSNPEPTGYDWSTTSGTFPTSAVAQGSQLVIHAVDSLFNTTFVCTVTNAVGMGRAEQVIFVRETPNTAGAGATGG

SEQ ID NO: 1451 - protein, 329 aa, Artificial sequence
  CD112 v107 ECD
QDVRVQVLPEVRGQLGGTVELPCHLLPPVPGLHISLVTWQRLDAPAKHQNVAAFHPKMGPSFPSPKPGSERLSFVSAKQSTGQDTEAELQDATLALHGLTMEDEGNYTCEFVTFPKGSVRGMTWLRVIAKPKNQAEAQKVTFSQDPTTVALCISKEGRPPARISWLSSLDWEAKETQVSGTLAGTVTVTSRFTLVPSGRADGVTVTCKVEHESFEEPALIPVTLSVRYPPEVSISGYDDNWYLGRTDATLSCDVRSNPEPTGYDWSTTSGTFPTSAVAQGSQLVIHAVDSLFNTTFVCTVTNAVGMGRAEQVIFVRETPNTAGAGATGG

SEQ ID NO: 1452 - protein, 329 aa, Artificial sequence
  CD112 v108 ECD
QDVRVQVLPEVRGQLGGTVELPCHLLPPVPGLHISLVTWQRPDAPAKHQNVAAFHPKMGPSFPSPKPGSERLSSVSAKQSTGKDTEAELQDATLALHGLTVEDEGIYTCELVTFPKGTVRGMTWLRVIAKPKNQAEAQKVTFSQDPTTVALCISKEGRPPARISWLSSLDWEAKETQVSGTLAGTVTVTSRFTLVPSGRADGVTVTCKVEHESFEEPALIPVTLSVRYPPEVSISGYDDNWYLGRTDATLSCDVRSNPEPTGYDWSTTSGTFPTSAVAQGSQLVIHAVDSLFNTTFVCTVTNAVGMGRAEQVIFVRETPNTAGAGATGG

SEQ ID NO: 1453 - protein, 329 aa, Artificial sequence
  CD112 v109 ECD
QDVRVQVLPEVRGQLGGTVELPCHLLPPVPGLHISLVTWQRPDAPANHQNVAAFHPKMGPSFPSPKPGSERLSFVSAKQSTGQDTEAELQDATLALHGLTVEDEGNYTCEFVTFPKGTARGMTWLRVIAKPKNQAEAQKVTFSQDPTTVALCISKEGRPPARISWLSSLDWEAKETQVSGTLAGTVTVTSRFTLVPSGRADGVTVTCKVEHESFEEPALIPVTLSVRYPPEVSISGYDDNWYLGRTDATLSCDVRSNPEPTGYDWSTTSGTFPTSAVAQGSQLVIHAVDSLFNTTFVCTVTNAVGMGRAEQVIFVRETPNTAGAGATGG

SEQ ID NO: 1454 - protein, 329 aa, Artificial sequence
  CD112 v100 ECD
QDVRVQVLPEVRGQLGGTVELPCHLLPPVPGLHISLVTWQRPDAPANHQNVAAFHPKMGPSFPSPKPGSERLSFVSAKQSTGQDTEAELQDATLALHGLTVEDEGIYTCEFVTFPKGFVRGMTWLRVIAKPKNQAEAQKVTFSQDPTTVALCISKEGRPPARISWLSSLDWEAKETQVSGTLAGTVTVTSRFTLVPSGRADGVTVTCKVEHESFEEPALIPVTLSVRYPPEVSISGYDDNWYLGRTDATLSCDVRSNPEPTGYDWSTTSGTFPTSAVAQGSQLVIHAVDSLFNTTFVCTVTNAVGMGRAEQVIFVRETPNTAGAGATGG

SEQ ID NO: 1455 - protein, 329 aa, Artificial sequence
  CD112 v111 ECD
QDVRVQVLPEVRGQLGGTVELPCHLLPPVPGLHISLVTWQRPDAPANHQNVAAFHPKMGPSFPSPMPGSERLSFVSAKQSTGQDTEAELQDATLALHGLTVEDEGNYTCEFATFPKGFVRGMTLLRVIAKPKNQAEAQKVTFSQDPTTVALCISKEGRPPARISWLSSLDWEAKETQVSGTLAGTVTVTSRFTLVPSGRADGVTVTCKVEHESFEEPALIPVTLSVRYPPEVSISGYDDNWYLGRTDATLSCDVRSNPEPTGYDWSTTSGTFPTSAVAQGSQLVIHAVDSLFNTTFVCTVTNAVGMGRAEQVIFVRETPNTAGAGATGG

SEQ ID NO: 1456 - protein, 329 aa, Artificial sequence
  CD112 v112 ECD
QDVRVQVLPEVRGQLGGTVELPCHLLPPVPGLYISLVTWQRPDAPANHQNVAAFHPKMGPSFPSPKPGSERLSFVSAKQSTGQDTEAELQDATLALHGLTVEDEGIYTCEFVTFPKGSVRGMTWLRVIAKPKNQAEAQKVTFSQDPTTVALCISKEGRPPARISWLSSLDWEAKETQVSGTLAGTVTVTSRFTLVPSGRADGVTVTCKVEHESFEEPALIPVTLSVRYPPEVSISGYDDNWYLGRTDATLSCDVRSNPEPTGYDWSTTSGTFPTSAVAQGSQLVIHAVDSLFNTTFVCTVTNAVGMGRAEQVIFVRETPNTAGAGATGG

SEQ ID NO: 1457 - protein, 125 aa, Artificial sequence
  CD112 v89 IgV
QDVRVQVLPEVRGQLGGTVELPCHLLPPVPGLHISLVTWQRPDAPANHQNVAAFHPKMGPSFPSPKPGSERLSFVSAKQSTGKDTEAELQDATLALHGLTVEDEGNYTCEFVTFPKGTVRGMTWL

SEQ ID NO: 1458 - protein, 125 aa, Artificial sequence
  CD112 v90 IgV
QDVRVQVLPEVRGQLGGTVELPCHLLPPMPGLHISLVTWQRPDAPANHQNVAAFHPKMGPSFPSPKPGSERLSFVSAKQSTGQDTEAELQDATLALHGLTVEDEGIYTCEFATFPKGFVRGMTWL

SEQ ID NO: 1459 - protein, 125 aa, Artificial sequence
  CD112 v91 IgV
QDVRVQVLPEVRGQLGGTVELPCHLLPPVPGLHISLVTWQRPDAPTNHQNVAAFHPKMGPSFPSPKPGSERLSFVSAKQSTGQDTEAELQDATLALHGLTVEDEGNYTCEFVTFPKGSVRGMTWL

SEQ ID NO: 1460 - protein, 125 aa, Artificial sequence
  CD112 v92 IgV
QDVRVQVLPEVRGQLGGTVELPCHLLPPVPGLHISLVTWQRPDAPANHQNVAAFHPKMGPSFPSPKPGSERLSFVSAKRSTGQDTEAELQDATLALHGLTVEDEGNYTCEFATFPKGFVRGMTWL

SEQ ID NO: 1461 - protein, 125 aa, Artificial sequence
  CD112 v93 IgV
QDVRVQVLPEVRGQLGGTVELPCHLLPPVPGLHISLVTWQRPDAPAKHQNVAAFHPKMGPSFPSPKPGSERLSLVSAKQSTGQDTEAELQDATLALHGLTVEDEGNYTCEFATFPKGFVRGMTWL

SEQ ID NO: 1462 - protein, 125 aa, Artificial sequence
  CD112 v94 IgV
QDVRVQVLPEVWGQLGGTVELPCHLLPPVPGLYISLVTWQRPDAPANHQNVAAFHPKMGPSFPSPKPGSERLSFVSAKQSTGQDTEAELQDATLALHGLTMEDEGIYTCEFATFPKGYVRGMTWL

SEQ ID NO: 1463 - protein, 125 aa, Artificial sequence
  CD112 v95 IgV
QDVRVQVLPEVRGQLGGTVELPCHLLPPVPGLYISLVTWQRPDAPTNHQNVAAFHPKMGPSFPSPKPGSERLSFVSAKQSTGQDTEAELQDATLALHGLTAEDEGIYTCEFATFPKGYVRGMTWL

SEQ ID NO: 1464 - protein, 125 aa, Artificial sequence
  CD112 v96 IgV
QDVRVQVLPEVRGQLGGTVELPCHLLPPVPGLYISLVTWQRPDAPANHQNVAAFHPKMGPSFPSPKPGSERLSFVSAKQSTGQDTEAELQDATLALHGLTVEDEGYYTCEFVTFPKGTVRGMTWL

SEQ ID NO: 1465 - protein, 125 aa, Artificial sequence
  CD112 v97 IgV
QDVRVQVLPEVRGQLGGTVELPCHLLPPVPGLYISLVTWQRPDAPANHQNVAAFHPKMGPSFPSPKPGSERLSFVPAKQSIGQDTEAELQDATLALHGLTMEDEGYYTCEFVTFPKGFVRGMTWL

SEQ ID NO: 1466 - protein, 125 aa, Artificial sequence
  CD112 v98 IgV
QDVRVQVLREVRGQLGGTVEVLCHLLPPVPGLYMSLVTWQRPDAPANHQNVAAFHPKMGPSFPSPKPGFERLSLVSAKQSTGQDTEVELQDATLALHGLTVEDEGNYTCEFVTFPKGSVRGMTWA

SEQ ID NO: 1467 - protein, 125 aa, Artificial sequence
  CD112 v99 IgV
QDVRVQVLPEVRGQLGGTVELPCHLLPPVPGLHISLVTWQRPDAPANHQNVAAFHPKMGPSFPSPKPGSERLSFVSAKQSTGQDTEAELQDATLALHGLTMEDEGNYTCEFVTFPKGSVRGMTWL

SEQ ID NO: 1468 - protein, 125 aa, Artificial sequence
  CD112 v100 IgV
QDVRVQVLPEVRGQLGGTVELPCHLLPPAPGPYISLVTWQRPDAPANHQNVAAFHPKMGPSFPSPKPGSERLSFVSAKQSTGQDTEAELQDATLALHGLTVEDEGNYTCEFATFPKGFVRGMTWL

SEQ ID NO: 1469 - protein, 125 aa, Artificial sequence
  CD112 v101 IgV
QDVRVQVLPEVRGQLGGTVELPCHLLPPVPGLHISLVTWQRPDAPANHQNVAAFHPKMGPSFPSPKPGSERLSFVSAKQSTGQDTEAELQDATLALHGLTMEDEGIYTCEFVTFPKGSVRGMTWL

SEQ ID NO: 1470 - protein, 125 aa, Artificial sequence
  CD112 v102 IgV
QDVRVQVLPEVWGQLGGTVELPCHLLPPVPGLHISLVTWQRPDAPAKHQNVAAFHPKMGPSFPSPKPGSERLSFVSAKRSTGQDTEAELQDATLALHGLTVEDEGNYTCEFATFPKGYVRGMTWL

SEQ ID NO: 1471 - protein, 125 aa, Artificial sequence
  CD112 v103 IgV
QDVRVQVLPEVRGQLGGTVELPCHLLPPVPGLHISLVTWQRPDAPTNHQNVAAFHPKMGPSFPSPKPGSERLSFVSAKQSTGQDTEAELQDATLALHGLTVEDEGNYTCEFVTFPKGTVRGMTWL

SEQ ID NO: 1472 - protein, 125 aa, Artificial sequence
  CD112 v104 IgV
QDVRVQVLPEVRGQLGGTVELPCHLLPPVPGLHISLVTWQRPDAPANHQNVAAFHPKMGPSFPSPKPGSERLSFVSAKQSTGQDTEAELQDATLALHGLTVEDEGNYTCEFVTLPKGTVRGMTWL

SEQ ID NO: 1473 - protein, 125 aa, Artificial sequence
  CD112 v105 IgV
QDVRVQVLPEVRGQLGGTVELPCHLLPPVPGLHISLVAWQRPDAPTNHQNVAAFHPKMGPSFPSPKPGSERLSFVSAKQSTGQDTEAELQDATLALHGLTMEDEGNYTCEFVTFPKGSVRGMTWL

SEQ ID NO: 1474 - protein, 125 aa, Artificial sequence
  CD112 v106 IgV
QDVRVQVLPEVRGQLGGTVELPCHLLPSVPGLHISLVTWQRPDAPANHQNVAAFHPKMGPSFPSPKPGPERLSFVSAKQSTGQDTEAELQDATLALHGLTVEDEGIYTCEFVTFPKGYVRGMTWL

SEQ ID NO: 1475 - protein, 125 aa, Artificial sequence
  CD112 v107 IgV
QDVRVQVLPEVRGQLGGTVELPCHLLPPVPGLHISLVTWQRLDAPAKHQNVAAFHPKMGPSFPSPKPGSERLSFVSAKQSTGQDTEAELQDATLALHGLTMEDEGNYTCEFVTFPKGSVRGMTWL

SEQ ID NO: 1476 - protein, 125 aa, Artificial sequence
  CD112 v108 IgV
QDVRVQVLPEVRGQLGGTVELPCHLLPPVPGLHISLVTWQRPDAPAKHQNVAAFHPKMGPSFPSPKPGSERLSSVSAKQSTGKDTEAELQDATLALHGLTVEDEGIYTCELVTFPKGTVRGMTWL

SEQ ID NO: 1477 - protein, 125 aa, Artificial sequence
  CD112 v109 IgV
QDVRVQVLPEVRGQLGGTVELPCHLLPPVPGLHISLVTWQRPDAPANHQNVAAFHPKMGPSFPSPKPGSERLSFVSAKQSTGQDTEAELQDATLALHGLTVEDEGNYTCEFVTFPKGTARGMTWL

SEQ ID NO: 1478 - protein, 125 aa, Artificial sequence
  CD112 v100 IgV
QDVRVQVLPEVRGQLGGTVELPCHLLPPVPGLHISLVTWQRPDAPANHQNVAAFHPKMGPSFPSPKPGSERLSFVSAKQSTGQDTEAELQDATLALHGLTVEDEGIYTCEFVTFPKGFVRGMTWL

SEQ ID NO: 1479 - protein, 125 aa, Artificial sequence
  CD112 v111 IgV
QDVRVQVLPEVRGQLGGTVELPCHLLPPVPGLHISLVTWQRPDAPANHQNVAAFHPKMGPSFPSPMPGSERLSFVSAKQSTGQDTEAELQDATLALHGLTVEDEGNYTCEFATFPKGFVRGMTLL

SEQ ID NO: 1480 - protein, 125 aa, Artificial sequence
  CD112 v112 IgV
QDVRVQVLPEVRGQLGGTVELPCHLLPPVPGLYISLVTWQRPDAPANHQNVAAFHPKMGPSFPSPKPGSERLSFVSAKQSTGQDTEAELQDATLALHGLTVEDEGIYTCEFVTFPKGSVRGMTWL

SEQ ID NO: 1481 - protein, 127 aa, Artificial sequence
  CD112 v89 IgV
QDVRVQVLPEVRGQLGGTVELPCHLLPPVPGLHISLVTWQRPDAPANHQNVAAFHPKMGPSFPSPKPGSERLSFVSAKQSTGKDTEAELQDATLALHGLTVEDEGNYTCEFVTFPKGTVRGMTWLRV

SEQ ID NO: 1482 - protein, 127 aa, Artificial sequence
  CD112 v90 IgV
QDVRVQVLPEVRGQLGGTVELPCHLLPPMPGLHISLVTWQRPDAPANHQNVAAFHPKMGPSFPSPKPGSERLSFVSAKQSTGQDTEAELQDATLALHGLTVEDEGIYTCEFATFPKGFVRGMTWLRV

SEQ ID NO: 1483 - protein, 127 aa, Artificial sequence
  CD112 v91 IgV
QDVRVQVLPEVRGQLGGTVELPCHLLPPVPGLHISLVTWQRPDAPTNHQNVAAFHPKMGPSFPSPKPGSERLSFVSAKQSTGQDTEAELQDATLALHGLTVEDEGNYTCEFVTFPKGSVRGMTWLRV

SEQ ID NO: 1484 - protein, 127 aa, Artificial sequence
  CD112 v92 IgV
QDVRVQVLPEVRGQLGGTVELPCHLLPPVPGLHISLVTWQRPDAPANHQNVAAFHPKMGPSFPSPKPGSERLSFVSAKRSTGQDTEAELQDATLALHGLTVEDEGNYTCEFATFPKGFVRGMTWLRV

SEQ ID NO: 1485 - protein, 127 aa, Artificial sequence
  CD112 v93 IgV
QDVRVQVLPEVRGQLGGTVELPCHLLPPVPGLHISLVTWQRPDAPAKHQNVAAFHPKMGPSFPSPKPGSERLSLVSAKQSTGQDTEAELQDATLALHGLTVEDEGNYTCEFATFPKGFVRGMTWLRV

SEQ ID NO: 1486 - protein, 127 aa, Artificial sequence
  CD112 v94 IgV
QDVRVQVLPEVWGQLGGTVELPCHLLPPVPGLYISLVTWQRPDAPANHQNVAAFHPKMGPSFPSPKPGSERLSFVSAKQSTGQDTEAELQDATLALHGLTMEDEGIYTCEFATFPKGYVRGMTWLRV

SEQ ID NO: 1487 - protein, 127 aa, Artificial sequence
  CD112 v95 IgV
QDVRVQVLPEVRGQLGGTVELPCHLLPPVPGLYISLVTWQRPDAPTNHQNVAAFHPKMGPSFPSPKPGSERLSFVSAKQSTGQDTEAELQDATLALHGLTAEDEGIYTCEFATFPKGYVRGMTWLRV

SEQ ID NO: 1488 - protein, 127 aa, Artificial sequence
  CD112 v96 IgV
QDVRVQVLPEVRGQLGGTVELPCHLLPPVPGLYISLVTWQRPDAPANHQNVAAFHPKMGPSFPSPKPGSERLSFVSAKQSTGQDTEAELQDATLALHGLTVEDEGYYTCEFVTFPKGTVRGMTWLRV

SEQ ID NO: 1489 - protein, 127 aa, Artificial sequence
  CD112 v97 IgV
QDVRVQVLPEVRGQLGGTVELPCHLLPPVPGLYISLVTWQRPDAPANHQNVAAFHPKMGPSFPSPKPGSERLSFVPAKQSIGQDTEAELQDATLALHGLTMEDEGYYTCEFVTFPKGFVRGMTWLRV

SEQ ID NO: 1490 - protein, 127 aa, Artificial sequence
  CD112 v98 IgV
QDVRVQVLREVRGQLGGTVEVLCHLLPPVPGLYMSLVTWQRPDAPANHQNVAAFHPKMGPSFPSPKPGFERLSLVSAKQSTGQDTEVELQDATLALHGLTVEDEGNYTCEFVTFPKGSVRGMTWARV

SEQ ID NO: 1491 - protein, 127 aa, Artificial sequence
  CD112 v99 IgV
QDVRVQVLPEVRGQLGGTVELPCHLLPPVPGLHISLVTWQRPDAPANHQNVAAFHPKMGPSFPSPKPGSERLSFVSAKQSTGQDTEAELQDATLALHGLTMEDEGNYTCEFVTFPKGSVRGMTWLRV

SEQ ID NO: 1492 - protein, 127 aa, Artificial sequence
  CD112 v100 IgV
QDVRVQVLPEVRGQLGGTVELPCHLLPPAPGPYISLVTWQRPDAPANHQNVAAFHPKMGPSFPSPKPGSERLSFVSAKQSTGQDTEAELQDATLALHGLTVEDEGNYTCEFATFPKGFVRGMTWLRV

SEQ ID NO: 1493 - protein, 127 aa, Artificial sequence
  CD112 v101 IgV
QDVRVQVLPEVRGQLGGTVELPCHLLPPVPGLHISLVTWQRPDAPANHQNVAAFHPKMGPSFPSPKPGSERLSFVSAKQSTGQDTEAELQDATLALHGLTMEDEGIYTCEFVTFPKGSVRGMTWLRV

SEQ ID NO: 1494 - protein, 127 aa, Artificial sequence
  CD112 v102 IgV
QDVRVQVLPEVWGQLGGTVELPCHLLPPVPGLHISLVTWQRPDAPAKHQNVAAFHPKMGPSFPSPKPGSERLSFVSAKRSTGQDTEAELQDATLALHGLTVEDEGNYTCEFATFPKGYVRGMTWLRV

SEQ ID NO: 1495 - protein, 127 aa, Artificial sequence
  CD112 v103 IgV
QDVRVQVLPEVRGQLGGTVELPCHLLPPVPGLHISLVTWQRPDAPTNHQNVAAFHPKMGPSFPSPKPGSERLSFVSAKQSTGQDTEAELQDATLALHGLTVEDEGNYTCEFVTFPKGTVRGMTWLRV

SEQ ID NO: 1496 - protein, 127 aa, Artificial sequence
  CD112 v104 IgV
QDVRVQVLPEVRGQLGGTVELPCHLLPPVPGLHISLVTWQRPDAPANHQNVAAFHPKMGPSFPSPKPGSERLSFVSAKQSTGQDTEAELQDATLALHGLTVEDEGNYTCEFVTLPKGTVRGMTWLRV

SEQ ID NO: 1497 - protein, 127 aa, Artificial sequence
  CD112 v105 IgV
QDVRVQVLPEVRGQLGGTVELPCHLLPPVPGLHISLVAWQRPDAPTNHQNVAAFHPKMGPSFPSPKPGSERLSFVSAKQSTGQDTEAELQDATLALHGLTMEDEGNYTCEFVTFPKGSVRGMTWLRV

SEQ ID NO: 1498 - protein, 127 aa, Artificial sequence
  CD112 v106 IgV
QDVRVQVLPEVRGQLGGTVELPCHLLPSVPGLHISLVTWQRPDAPANHQNVAAFHPKMGPSFPSPKPGPERLSFVSAKQSTGQDTEAELQDATLALHGLTVEDEGIYTCEFVTFPKGYVRGMTWLRV

SEQ ID NO: 1499 - protein, 127 aa, Artificial sequence
  CD112 v107 IgV
QDVRVQVLPEVRGQLGGTVELPCHLLPPVPGLHISLVTWQRLDAPAKHQNVAAFHPKMGPSFPSPKPGSERLSFVSAKQSTGQDTEAELQDATLALHGLTMEDEGNYTCEFVTFPKGSVRGMTWLRV

SEQ ID NO: 1500 - protein, 127 aa, Artificial sequence
  CD112 v109 IgV
QDVRVQVLPEVRGQLGGTVELPCHLLPPVPGLHISLVTWQRPDAPAKHQNVAAFHPKMGPSFPSPKPGSERLSSVSAKQSTGKDTEAELQDATLALHGLTVEDEGIYTCELVTFPKGTVRGMTWLRV

SEQ ID NO: 1501 - protein, 127 aa, Artificial sequence
  CD112 v109 IgV
QDVRVQVLPEVRGQLGGTVELPCHLLPPVPGLHISLVTWQRPDAPANHQNVAAFHPKMGPSFPSPKPGSERLSFVSAKQSTGQDTEAELQDATLALHGLTVEDEGNYTCEFVTFPKGTARGMTWLRV

SEQ ID NO: 1502 - protein, 127 aa, Artificial sequence
  CD112 v100 IgV
QDVRVQVLPEVRGQLGGTVELPCHLLPPVPGLHISLVTWQRPDAPANHQNVAAFHPKMGPSFPSPKPGSERLSFVSAKQSTGQDTEAELQDATLALHGLTVEDEGIYTCEFVTFPKGFVRGMTWLRV

SEQ ID NO: 1503 - protein, 127 aa, Artificial sequence
  CD112 v111 IgV
QDVRVQVLPEVRGQLGGTVELPCHLLPPVPGLHISLVTWQRPDAPANHQNVAAFHPKMGPSFPSPMPGSERLSFVSAKQSTGQDTEAELQDATLALHGLTVEDEGNYTCEFATFPKGFVRGMTLLRV

SEQ ID NO: 1504 - protein, 127 aa, Artificial sequence
  CD112 v112 IgV
QDVRVQVLPEVRGQLGGTVELPCHLLPPVPGLYISLVTWQRPDAPANHQNVAAFHPKMGPSFPSPKPGSERLSFVSAKQSTGQDTEAELQDATLALHGLTVEDEGIYTCEFVTFPKGSVRGMTWLRV

SEQ ID NO: 1505 - protein, 116 aa, Artificial Sequence
  CD155 v120 IgV
PGTGDVVVQAPTQVSGFLGDSVTLPCYLQVPNMEVTHVSQLTWGRHGESGSMAVFHQTQGPSYSESKRLEFVAARPGAELRNASLRMSGLRVEDEGNYTCMFVAFPQGSWSVDIWL

SEQ ID NO: 1506 - protein, 116 aa, Artificial Sequence
  CD155 v121 IgV
PGTGDVVVQAPTQVTGFLGGAVTLPCYLQVPDMEVTHVSQLTWARLGESGSMAVFHQTQGPSYSESKRLEFVAARPGAELRNASLRMSGLRVEDEGNYTCMFVTFPQRSRSVDIWL

SEQ ID NO: 1507 - protein, 116 aa, Artificial Sequence
  CD155 v122 IgV
PGTGDLVVQAPTQVSGFLGDSVTLPCYLQVPNMEVTHVSQLTWARHGESGSMAVFHRTQGPSYSESKRLEFLAARPGAELRNASLKMSGLRVEDEGNYTCEFVTFPQRSRSVDIWL

SEQ ID NO: 1508 - protein, 116 aa, Artificial Sequence
  CD155 v123 IgV
PGTGDVVVQAPTQVSGFLGDSVTLPCYLQVPNMEVTHVSQLTWARRGESGSMAVFHQTQGPSYSESKRLDFVAARPGAELRDASLRMSGLRAEDEGNYTCMFVTFPQRSRSVDIWL

SEQ ID NO: 1509 - protein, 116 aa, Artificial Sequence
  CD155 v124 IgV
PGTGDVVAQAPTQVSGFLGDSVTLPCYLQVPNMEVTHVSQLTWARHGESGSMAVFHQTQGPSYSESKRLEFVAARPGAELRNASLRMSGLRVEDEGNYTCMFVTFPQRSRSVDIWL

SEQ ID NO: 1510 - protein, 116 aa, Artificial Sequence
  CD155 v125 IgV
PGTGDVVAQAPTQVSGFLGDSVTLPCYLQVPNMEVTHVSQLTWARHGESGRMAVFHPTKGPSYSESKRLEFVAARPGAELRDASLRMSGLRVEDEGNYTCLFVMFPQGSRSVDIWL

SEQ ID NO: 1511 - protein, 116 aa, Artificial Sequence
  CD155 v126 IgV
PGTGDVVVQAPTQVTGFLGDSVTLPCYLQVPNMEVTHVSQLTWARHGEPGSMAVFHQTQGPAYVESKRLEFVAARPGAELRNASLRMSGLRVEDEGNYTCMFVTFPQRSRSVDIWL

SEQ ID NO: 1512 - protein, 116 aa, Artificial Sequence
  CD155 v127 IgV
PGTGDVVVQAPTQVTGFLGDSVTLPCYLQVPNTEVTHVSQLTWARHGESGSMAVFHQTQGPSYSESKRLEFVAARPGAELRNASLRMSGLRVEDEGNYTCLFVTFPQRSRSVDIWL

SEQ ID NO: 1513 - protein, 116 aa, Artificial Sequence
  CD155 v128 IgV
PGTGGVVVQAPTQVSGFLGDSVTLPCYLQVPNIEATHVSQLTWARQGESGSMAVFHQTQGPSYSESKRLEFVEARLGAELRNASLRMSGLRVEDEGNYTCMFVAFPQGSWSVDIWL

SEQ ID NO: 1514 - protein, 116 aa, Artificial Sequence
  CD155 v129 IgV
PGTGDVVVQAPTQVSGFLGDSVTLPCYLQVPNMEVTHVSQLTWARHGEPGSMAVFHQTQGPAYVESKRLEFVAARPGAELRNASLRMSGLRVEDEGNYTCMFVSFPQGSWSVDIWL

SEQ ID NO: 1515 - protein, 116 aa, Artificial Sequence
  CD155 v130 IgV
PGTGDVVVQAPIQVTGFLGDSVTLPCYLQVPNMEVTHVSQLTWARHGESGSMAVFHQTQGPSYSESKRLEFVAARPGAELRNASLRMSGLRVEDEGNYTCMFVTFPQRSRSVDIWL

SEQ ID NO: 1516 - protein, 116 aa, Artificial Sequence
  CD155 v131 IgV
PGTGDVVVQAPTQVFGFLGDSVMLPCYLQVPNMEVTHVSQVTWARHGESGSMAVFHQTKGPSYSESKRLEFVAARPGADLRNASLRMSGLRVEDEGNYTCMFVTFPQDSRSVDIWL

SEQ ID NO: 1517 - protein, 116 aa, Artificial Sequence
  CD155 v132 IgV
PGTGDVVVQAPTQVTGFLGDSVTLPCYLQVPNMGVTHVSQLTWARHGESRSMAVFHQTKGPSYSESKRLEFVAARPGAELRNASLRMSGLRVEDDGNYTCMFVMFPQGSRSVDIWL

SEQ ID NO: 1518 - protein, 116 aa, Artificial Sequence
  CD155 v133 IgV
PGTGDVVVQAPTQVLGFLGDSVTLPCYLQVPNMEVTHVSQLTWARHGESGSMAVFHQTQGPSYSESERLEFVAARPGAELRNASLRMSGLRAEDEGNYTCLFVTFPQRSRSVDIWL

SEQ ID NO: 1519 - protein, 116 aa, Artificial Sequence
  CD155 v134 IgV
PGTGDIVVKAPTQVFGFLGDSVTLPCYLQVPNMEVTHVSQLTWARHGESGSMAVFHQTQGPAYVESKRLEFVAARPGAELRNASLRMFGLRVEDEGNYTCTFVTFPQRIRSVDIWL

SEQ ID NO: 1520 - protein, 116 aa, Artificial Sequence
  CD155 v135 IgV
PGTGDVVVQAPTQVFGFLGDSVTLPCYLQVPNMEVTHVSQLTWARHGESGSMAVFHQTQGPAYVESKRLEFVAARLGAELRNASLRMSGLRVEDEGNYTCMFVTFPQRSRSVDIWL

SEQ ID NO: 1521 - protein, 116 aa, Artificial Sequence
  CD155 v136 IgV
PGTGDIIVQAPTQVSGSLGDSVTLPCYLQVPNMEVTHVSQLAWARHGESGSMAVFHQTQGPSYSESKRLEFVAARPGAELRNASLRMSGLRVEDEGNYTCMFVTYPQRVRSVDIWL

SEQ ID NO: 1522 - protein, 116 aa, Artificial Sequence
  CD155 v137 IgV
PGTGDLVVQAPTQVLGFLGDSVTLPCYLQVPNMEVTHVSQLTWARHGESGSMAVFHQTQGPSYSESKRLEFVAARPGAELRNASLRISGLRVEDEGNYSCMFVTFPQRSRSVDIWL

SEQ ID NO: 1523 - protein, 116 aa, Artificial Sequence
  CD155 v138 IgV
PGTGDVVVQAPTQVCGFLGDSVMLPCYLQVPNMEVTHVSQVTWARHGESGSIAVFHQTKGPSYSESKRLEFVAARPGAELRNASLRMSGLRVEDEGNYTCMFVMFPQGSRSVDIWL

SEQ ID NO: 1524 - protein, 116 aa, Artificial Sequence
  CD155 v139 IgV
PGTGDIVVQAPTQVTGFLGGSVTLPCYLQVPNMEVTHVSQLTWARHGESGSMAVFHQTQGPSYSESKRLEFVAARPGAELRNASLRMSGLRVEDEGNYTCLFVTFPQRSRSVDIWL

SEQ ID NO: 1525 - protein, 116 aa, Artificial Sequence
  CD155 v140 IgV
PGTGDVVVQAPTQVFGFLGDSVTLPCYLQVPNMEVTHVSQLTWARHGESGSMAVFHQTQGPSYSESKRLEFVAARPGAELRNASLRLSGLRAEDEGNYTCMFVTFPQRSRSVDIWL

SEQ ID NO: 1526 - protein, 116 aa, Artificial Sequence
  CD155 v141 IgV
PGTGDVVVQAPTQVTGFLGDSVTLPCYLQVPNTEVTHVSQLTWARHGESGSMAVFHQTQGPAYEESKRLEFVAARQGTELRNASLRMSGLRVEDEGNYTCLFVTFPQRSRSVDIWL

SEQ ID NO: 1527 - protein, 116 aa, Artificial Sequence
  CD155 v142 IgV
PGTGDLVVQAPTQVTGFLGDSVTLPCYLQVPNMEVTHVSQLTWARHGESGSMAVFHQTRGPSYSESKRLEFVAARPGAELRNASLRMSGLRVEDEGNYTCMFVTFPQRSRSVDIWL

SEQ ID NO: 1528 - protein, 122 aa, Artificial Sequence
  CD155 v120 IgV
WPPPGTGDVVVQAPTQVSGFLGDSVTLPCYLQVPNMEVTHVSQLTWGRHGESGSMAVFHQTQGPSYSESKRLEFVAARPGAELRNASLRMSGLRVEDEGNYTCMFVAFPQGSWSVDIWLRVL

SEQ ID NO: 1529 - protein, 122 aa, Artificial Sequence
  CD155 v121 IgV
WPPPGTGDVVVQAPTQVTGFLGGAVTLPCYLQVPDMEVTHVSQLTWARLGESGSMAVFHQTQGPSYSESKRLEFVAARPGAELRNASLRMSGLRVEDEGNYTCMFVTFPQRSRSVDIWLRVL

SEQ ID NO: 1530 - protein, 122 aa, Artificial Sequence
  CD155 v122 IgV
WPPPGTGDLVVQAPTQVSGFLGDSVTLPCYLQVPNMEVTHVSQLTWARHGESGSMAVFHRTQGPSYSESKRLEFLAARPGAELRNASLKMSGLRVEDEGNYTCEFVTFPQRSRSVDIWLRVL

SEQ ID NO: 1531 - protein, 122 aa, Artificial Sequence
  CD155 v123 IgV
WPPPGTGDVVVQAPTQVSGFLGDSVTLPCYLQVPNMEVTHVSQLTWARRGESGSMAVFHQTQGPSYSESKRLDFVAARPGAELRDASLRMSGLRAEDEGNYTCMFVTFPQRSRSVDIWLRVL

SEQ ID NO: 1532 - protein, 122 aa, Artificial Sequence
  CD155 v124 IgV
WPPPGTGDVVAQAPTQVSGFLGDSVTLPCYLQVPNMEVTHVSQLTWARHGESGSMAVFHQTQGPSYSESKRLEFVAARPGAELRNASLRMSGLRVEDEGNYTCMFVTFPQRSRSVDIWLRVL

SEQ ID NO: 1533 - protein, 122 aa, Artificial Sequence
  CD155 v125 IgV
WPPPGTGDVVAQAPTQVSGFLGDSVTLPCYLQVPNMEVTHVSQLTWARHGESGRMAVFHPTKGPSYSESKRLEFVAARPGAELRDASLRMSGLRVEDEGNYTCLFVMFPQGSRSVDIWLRVL

SEQ ID NO: 1534 - protein, 122 aa, Artificial Sequence
  CD155 v126 IgV
WPPPGTGDVVVQAPTQVTGFLGDSVTLPCYLQVPNMEVTHVSQLTWARHGEPGSMAVFHQTQGPAYVESKRLEFVAARPGAELRNASLRMSGLRVEDEGNYTCMFVTFPQRSRSVDIWLRVL

SEQ ID NO: 1535 - protein, 122 aa, Artificial Sequence
  CD155 v127 IgV
WPPPGTGDVVVQAPTQVTGFLGDSVTLPCYLQVPNTEVTHVSQLTWARHGESGSMAVFHQTQGPSYSESKRLEFVAARPGAELRNASLRMSGLRVEDEGNYTCLFVTFPQRSRSVDIWLRVL

SEQ ID NO: 1536 - protein, 122 aa, Artificial Sequence
  CD155 v128 IgV
WPPPGTGGVVVQAPTQVSGFLGDSVTLPCYLQVPNIEATHVSQLTWARQGESGSMAVFHQTQGPSYSESKRLEFVEARLGAELRNASLRMSGLRVEDEGNYTCMFVAFPQGSWSVDIWLRVL

SEQ ID NO: 1537 - protein, 122 aa, Artificial Sequence
  CD155 v129 IgV
WPPPGTGDVVVQAPTQVSGFLGDSVTLPCYLQVPNMEVTHVSQLTWARHGEPGSMAVFHQTQGPAYVESKRLEFVAARPGAELRNASLRMSGLRVEDEGNYTCMFVSFPQGSWSVDIWLRVL

SEQ ID NO: 1538 - protein, 122 aa, Artificial Sequence
  CD155 v130 IgV
WPPPGTGDVVVQAPIQVTGFLGDSVTLPCYLQVPNMEVTHVSQLTWARHGESGSMAVFHQTQGPSYSESKRLEFVAARPGAELRNASLRMSGLRVEDEGNYTCMFVTFPQRSRSVDIWLRVL

SEQ ID NO: 1539 - protein, 122 aa, Artificial Sequence
  CD155 v131 IgV
WPPPGTGDVVVQAPTQVFGFLGDSVMLPCYLQVPNMEVTHVSQVTWARHGESGSMAVFHQTKGPSYSESKRLEFVAARPGADLRNASLRMSGLRVEDEGNYTCMFVTFPQDSRSVDIWLRVL

SEQ ID NO: 1540 - protein, 122 aa, Artificial Sequence
  CD155 v132 IgV
WPPPGTGDVVVQAPTQVTGFLGDSVTLPCYLQVPNMGVTHVSQLTWARHGESRSMAVFHQTKGPSYSESKRLEFVAARPGAELRNASLRMSGLRVEDDGNYTCMFVMFPQGSRSVDIWLRVL

SEQ ID NO: 1541 - protein, 122 aa, Artificial Sequence
  CD155 v133 IgV
WPPPGTGDVVVQAPTQVLGFLGDSVTLPCYLQVPNMEVTHVSQLTWARHGESGSMAVFHQTQGPSYSESERLEFVAARPGAELRNASLRMSGLRAEDEGNYTCLFVTFPQRSRSVDIWLRVL

SEQ ID NO: 1542 - protein, 122 aa, Artificial Sequence
  CD155 v134 IgV
WPPPGTGDIVVKAPTQVFGFLGDSVTLPCYLQVPNMEVTHVSQLTWARHGESGSMAVFHQTQGPAYVESKRLEFVAARPGAELRNASLRMFGLRVEDEGNYTCTFVTFPQRIRSVDIWLRVL

SEQ ID NO: 1543 - protein, 122 aa, Artificial Sequence
  CD155 v135 IgV
WPPPGTGDVVVQAPTQVFGFLGDSVTLPCYLQVPNMEVTHVSQLTWARHGESGSMAVFHQTQGPAYVESKRLEFVAARLGAELRNASLRMSGLRVEDEGNYTCMFVTFPQRSRSVDIWLRVL

SEQ ID NO: 1544 - protein, 122 aa, Artificial Sequence
  CD155 v136 IgV
WPPPGTGDIIVQAPTQVSGSLGDSVTLPCYLQVPNMEVTHVSQLAWARHGESGSMAVFHQTQGPSYSESKRLEFVAARPGAELRNASLRMSGLRVEDEGNYTCMFVTYPQRVRSVDIWLRVL

SEQ ID NO: 1545 - protein, 122 aa, Artificial Sequence
  CD155 v137 IgV
WPPPGTGDLVVQAPTQVLGFLGDSVTLPCYLQVPNMEVTHVSQLTWARHGESGSMAVFHQTQGPSYSESKRLEFVAARPGAELRNASLRISGLRVEDEGNYSCMFVTFPQRSRSVDIWLRVL

SEQ ID NO: 1546 - protein, 122 aa, Artificial Sequence
  CD155 v138 IgV
WPPPGTGDVVVQAPTQVCGFLGDSVMLPCYLQVPNMEVTHVSQVTWARHGESGSIAVFHQTKGPSYSESKRLEFVAARPGAELRNASLRMSGLRVEDEGNYTCMFVMFPQGSRSVDIWLRVL

SEQ ID NO: 1547 - protein, 122 aa, Artificial Sequence
  CD155 v139 IgV
WPPPGTGDIVVQAPTQVTGFLGGSVTLPCYLQVPNMEVTHVSQLTWARHGESGSMAVFHQTQGPSYSESKRLEFVAARPGAELRNASLRMSGLRVEDEGNYTCLFVTFPQRSRSVDIWLRVL

SEQ ID NO: 1548 - protein, 122 aa, Artificial Sequence
  CD155 v140 IgV
WPPPGTGDVVVQAPTQVFGFLGDSVTLPCYLQVPNMEVTHVSQLTWARHGESGSMAVFHQTQGPSYSESKRLEFVAARPGAELRNASLRLSGLRAEDEGNYTCMFVTFPQRSRSVDIWLRVL

SEQ ID NO: 1549 - protein, 122 aa, Artificial Sequence
  CD155 v141 IgV
WPPPGTGDVVVQAPTQVTGFLGDSVTLPCYLQVPNTEVTHVSQLTWARHGESGSMAVFHQTQGPAYEESKRLEFVAARQGTELRNASLRMSGLRVEDEGNYTCLFVTFPQRSRSVDIWLRVL

SEQ ID NO: 1550 - protein, 122 aa, Artificial Sequence
  CD155 v142 IgV
WPPPGTGDLVVQAPTQVTGFLGDSVTLPCYLQVPNMEVTHVSQLTWARHGESGSMAVFHQTRGPSYSESKRLEFVAARPGAELRNASLRMSGLRVEDEGNYTCMFVTFPQRSRSVDIWLRVL

SEQ ID NO: 1551 - protein, 323 aa, Artificial Sequence
  CD155 v120 ECD
WPPPGTGDVVVQAPTQVSGFLGDSVTLPCYLQVPNMEVTHVSQLTWGRHGESGSMAVFHQTQGPSYSESKRLEFVAARPGAELRNASLRMSGLRVEDEGNYTCMFVAFPQGSWSVDIWLRVLAKPQNTAEVQKVQLTGEPVPMARCVSTGGRPPAQITWHSDLGGMPNTSQVPGFLSGTVTVTSLWILVPSSQVDGKNVTCKVEHESFEKPQLLTVNLTVYYPPEVSISGYDNNWYLGQNEATLTCDARSNPEPTGYNWSTTMGPLPPFAVAQGAQLLIRPVDKPINTTLICNVTNALGARQAELTVQVKEGPPSEHSGISRN

SEQ ID NO: 1552 - protein, 323 aa, Artificial Sequence
  CD155 v121 ECD
WPPPGTGDVVVQAPTQVTGFLGGAVTLPCYLQVPDMEVTHVSQLTWARLGESGSMAVFHQTQGPSYSESKRLEFVAARPGAELRNASLRMSGLRVEDEGNYTCMFVTFPQRSRSVDIWLRVLAKPQNTAEVQKVQLTGEPVPMARCVSTGGRPPAQITWHSDLGGMPNTSQVPGFLSGTVTVTSLWILVPSSQVDGKNVTCKVEHESFEKPQLLTVNLTVYYPPEVSISGYDNNWYLGQNEATLTCDARSNPEPTGYNWSTTMGPLPPFAVAQGAQLLIRPVDKPINTTLICNVTNALGARQAELTVQVKEGPPSEHSGISRN

SEQ ID NO: 1553 - protein, 323 aa, Artificial Sequence
  CD155 v122 ECD
WPPPGTGDLVVQAPTQVSGFLGDSVTLPCYLQVPNMEVTHVSQLTWARHGESGSMAVFHRTQGPSYSESKRLEFLAARPGAELRNASLKMSGLRVEDEGNYTCEFVTFPQRSRSVDIWLRVLAKPQNTAEVQKVQLTGEPVPMARCVSTGGRPPAQITWHSDLGGMPNTSQVPGFLSGTVTVTSLWILVPSSQVDGKNVTCKVEHESFEKPQLLTVNLTVYYPPEVSISGYDNNWYLGQNEATLTCDARSNPEPTGYNWSTTMGPLPPFAVAQGAQLLIRPVDKPINTTLICNVTNALGARQAELTVQVKEGPPSEHSGISRN

SEQ ID NO: 1554 - protein, 323 aa, Artificial Sequence
  CD155 v123 ECD
WPPPGTGDVVVQAPTQVSGFLGDSVTLPCYLQVPNMEVTHVSQLTWARRGESGSMAVFHQTQGPSYSESKRLDFVAARPGAELRDASLRMSGLRAEDEGNYTCMFVTFPQRSRSVDIWLRVLAKPQNTAEVQKVQLTGEPVPMARCVSTGGRPPAQITWHSDLGGMPNTSQVPGFLSGTVTVTSLWILVPSSQVDGKNVTCKVEHESFEKPQLLTVNLTVYYPPEVSISGYDNNWYLGQNEATLTCDARSNPEPTGYNWSTTMGPLPPFAVAQGAQLLIRPVDKPINTTLICNVTNALGARQAELTVQVKEGPPSEHSGISRN

SEQ ID NO: 1555 - protein, 323 aa, Artificial Sequence
  CD155 v124 ECD
WPPPGTGDVVAQAPTQVSGFLGDSVTLPCYLQVPNMEVTHVSQLTWARHGESGSMAVFHQTQGPSYSESKRLEFVAARPGAELRNASLRMSGLRVEDEGNYTCMFVTFPQRSRSVDIWLRVLAKPQNTAEVQKVQLTGEPVPMARCVSTGGRPPAQITWHSDLGGMPNTSQVPGFLSGTVTVTSLWILVPSSQVDGKNVTCKVEHESFEKPQLLTVNLTVYYPPEVSISGYDNNWYLGQNEATLTCDARSNPEPTGYNWSTTMGPLPPFAVAQGAQLLIRPVDKPINTTLICNVTNALGARQAELTVQVKEGPPSEHSGISRN

SEQ ID NO: 1556 - protein, 323 aa, Artificial Sequence
  CD155 v125 ECD
WPPPGTGDVVAQAPTQVSGFLGDSVTLPCYLQVPNMEVTHVSQLTWARHGESGRMAVFHPTKGPSYSESKRLEFVAARPGAELRDASLRMSGLRVEDEGNYTCLFVMFPQGSRSVDIWLRVLAKPQNTAEVQKVQLTGEPVPMARCVSTGGRPPAQITWHSDLGGMPNTSQVPGFLSGTVTVTSLWILVPSSQVDGKNVTCKVEHESFEKPQLLTVNLTVYYPPEVSISGYDNNWYLGQNEATLTCDARSNPEPTGYNWSTTMGPLPPFAVAQGAQLLIRPVDKPINTTLICNVTNALGARQAELTVQVKEGPPSEHSGISRN

SEQ ID NO: 1557 - protein, 323 aa, Artificial Sequence
  CD155 v126 ECD
WPPPGTGDVVVQAPTQVTGFLGDSVTLPCYLQVPNMEVTHVSQLTWARHGEPGSMAVFHQTQGPAYVESKRLEFVAARPGAELRNASLRMSGLRVEDEGNYTCMFVTFPQRSRSVDIWLRVLAKPQNTAEVQKVQLTGEPVPMARCVSTGGRPPAQITWHSDLGGMPNTSQVPGFLSGTVTVTSLWILVPSSQVDGKNVTCKVEHESFEKPQLLTVNLTVYYPPEVSISGYDNNWYLGQNEATLTCDARSNPEPTGYNWSTTMGPLPPFAVAQGAQLLIRPVDKPINTTLICNVTNALGARQAELTVQVKEGPPSEHSGISRN

SEQ ID NO: 1558 - protein, 323 aa, Artificial Sequence
  CD155 v127 ECD
WPPPGTGDVVVQAPTQVTGFLGDSVTLPCYLQVPNTEVTHVSQLTWARHGESGSMAVFHQTQGPSYSESKRLEFVAARPGAELRNASLRMSGLRVEDEGNYTCLFVTFPQRSRSVDIWLRVLAKPQNTAEVQKVQLTGEPVPMARCVSTGGRPPAQITWHSDLGGMPNTSQVPGFLSGTVTVTSLWILVPSSQVDGKNVTCKVEHESFEKPQLLTVNLTVYYPPEVSISGYDNNWYLGQNEATLTCDARSNPEPTGYNWSTTMGPLPPFAVAQGAQLLIRPVDKPINTTLICNVTNALGARQAELTVQVKEGPPSEHSGISRN

SEQ ID NO: 1559 - protein, 323 aa, Artificial Sequence
  CD155 v128 ECD
WPPPGTGGVVVQAPTQVSGFLGDSVTLPCYLQVPNIEATHVSQLTWARQGESGSMAVFHQTQGPSYSESKRLEFVEARLGAELRNASLRMSGLRVEDEGNYTCMFVAFPQGSWSVDIWLRVLAKPQNTAEVQKVQLTGEPVPMARCVSTGGRPPAQITWHSDLGGMPNTSQVPGFLSGTVTVTSLWILVPSSQVDGKNVTCKVEHESFEKPQLLTVNLTVYYPPEVSISGYDNNWYLGQNEATLTCDARSNPEPTGYNWSTTMGPLPPFAVAQGAQLLIRPVDKPINTTLICNVTNALGARQAELTVQVKEGPPSEHSGISRN

SEQ ID NO: 1560 - protein, 323 aa, Artificial Sequence
  CD155 v129 ECD
WPPPGTGDVVVQAPTQVSGFLGDSVTLPCYLQVPNMEVTHVSQLTWARHGEPGSMAVFHQTQGPAYVESKRLEFVAARPGAELRNASLRMSGLRVEDEGNYTCMFVSFPQGSWSVDIWLRVLAKPQNTAEVQKVQLTGEPVPMARCVSTGGRPPAQITWHSDLGGMPNTSQVPGFLSGTVTVTSLWILVPSSQVDGKNVTCKVEHESFEKPQLLTVNLTVYYPPEVSISGYDNNWYLGQNEATLTCDARSNPEPTGYNWSTTMGPLPPFAVAQGAQLLIRPVDKPINTTLICNVTNALGARQAELTVQVKEGPPSEHSGISRN

SEQ ID NO: 1561 - protein, 323 aa, Artificial Sequence
  CD155 v130 ECD
WPPPGTGDVVVQAPIQVTGFLGDSVTLPCYLQVPNMEVTHVSQLTWARHGESGSMAVFHQTQGPSYSESKRLEFVAARPGAELRNASLRMSGLRVEDEGNYTCMFVTFPQRSRSVDIWLRVLAKPQNTAEVQKVQLTGEPVPMARCVSTGGRPPAQITWHSDLGGMPNTSQVPGFLSGTVTVTSLWILVPSSQVDGKNVTCKVEHESFEKPQLLTVNLTVYYPPEVSISGYDNNWYLGQNEATLTCDARSNPEPTGYNWSTTMGPLPPFAVAQGAQLLIRPVDKPINTTLICNVTNALGARQAELTVQVKEGPPSEHSGISRN

SEQ ID NO: 1562 - protein, 323 aa, Artificial Sequence
  CD155 v131 ECD
WPPPGTGDVVVQAPTQVFGFLGDSVMLPCYLQVPNMEVTHVSQVTWARHGESGSMAVFHQTKGPSYSESKRLEFVAARPGADLRNASLRMSGLRVEDEGNYTCMFVTFPQDSRSVDIWLRVLAKPQNTAEVQKVQLTGEPVPMARCVSTGGRPPAQITWHSDLGGMPNTSQVPGFLSGTVTVTSLWILVPSSQVDGKNVTCKVEHESFEKPQLLTVNLTVYYPPEVSISGYDNNWYLGQNEATLTCDARSNPEPTGYNWSTTMGPLPPFAVAQGAQLLIRPVDKPINTTLICNVTNALGARQAELTVQVKEGPPSEHSGISRN

SEQ ID NO: 1563 - protein, 323 aa, Artificial Sequence
  CD155 v132 ECD
WPPPGTGDVVVQAPTQVTGFLGDSVTLPCYLQVPNMGVTHVSQLTWARHGESRSMAVFHQTKGPSYSESKRLEFVAARPGAELRNASLRMSGLRVEDDGNYTCMFVMFPQGSRSVDIWLRVLAKPQNTAEVQKVQLTGEPVPMARCVSTGGRPPAQITWHSDLGGMPNTSQVPGFLSGTVTVTSLWILVPSSQVDGKNVTCKVEHESFEKPQLLTVNLTVYYPPEVSISGYDNNWYLGQNEATLTCDARSNPEPTGYNWSTTMGPLPPFAVAQGAQLLIRPVDKPINTTLICNVTNALGARQAELTVQVKEGPPSEHSGISRN

SEQ ID NO: 1564 - protein, 323 aa, Artificial Sequence
  CD155 v133 ECD
WPPPGTGDVVVQAPTQVLGFLGDSVTLPCYLQVPNMEVTHVSQLTWARHGESGSMAVFHQTQGPSYSESERLEFVAARPGAELRNASLRMSGLRAEDEGNYTCLFVTFPQRSRSVDIWLRVLAKPQNTAEVQKVQLTGEPVPMARCVSTGGRPPAQITWHSDLGGMPNTSQVPGFLSGTVTVTSLWILVPSSQVDGKNVTCKVEHESFEKPQLLTVNLTVYYPPEVSISGYDNNWYLGQNEATLTCDARSNPEPTGYNWSTTMGPLPPFAVAQGAQLLIRPVDKPINTTLICNVTNALGARQAELTVQVKEGPPSEHSGISRN

SEQ ID NO: 1565 - protein, 323 aa, Artificial Sequence
  CD155 v134 ECD
WPPPGTGDIVVKAPTQVFGFLGDSVTLPCYLQVPNMEVTHVSQLTWARHGESGSMAVFHQTQGPAYVESKRLEFVAARPGAELRNASLRMFGLRVEDEGNYTCTFVTFPQRIRSVDIWLRVLAKPQNTAEVQKVQLTGEPVPMARCVSTGGRPPAQITWHSDLGGMPNTSQVPGFLSGTVTVTSLWILVPSSQVDGKNVTCKVEHESFEKPQLLTVNLTVYYPPEVSISGYDNNWYLGQNEATLTCDARSNPEPTGYNWSTTMGPLPPFAVAQGAQLLIRPVDKPINTTLICNVTNALGARQAELTVQVKEGPPSEHSGISRN

SEQ ID NO: 1566 - protein, 323 aa, Artificial Sequence
  CD155 v135 ECD
WPPPGTGDVVVQAPTQVFGFLGDSVTLPCYLQVPNMEVTHVSQLTWARHGESGSMAVFHQTQGPAYVESKRLEFVAARLGAELRNASLRMSGLRVEDEGNYTCMFVTFPQRSRSVDIWLRVLAKPQNTAEVQKVQLTGEPVPMARCVSTGGRPPAQITWHSDLGGMPNTSQVPGFLSGTVTVTSLWILVPSSQVDGKNVTCKVEHESFEKPQLLTVNLTVYYPPEVSISGYDNNWYLGQNEATLTCDARSNPEPTGYNWSTTMGPLPPFAVAQGAQLLIRPVDKPINTTLICNVTNALGARQAELTVQVKEGPPSEHSGISRN

SEQ ID NO: 1567 - protein, 323 aa, Artificial Sequence
  CD155 v136 ECD
WPPPGTGDIIVQAPTQVSGSLGDSVTLPCYLQVPNMEVTHVSQLAWARHGESGSMAVFHQTQGPSYSESKRLEFVAARPGAELRNASLRMSGLRVEDEGNYTCMFVTYPQRVRSVDIWLRVLAKPQNTAEVQKVQLTGEPVPMARCVSTGGRPPAQITWHSDLGGMPNTSQVPGFLSGTVTVTSLWILVPSSQVDGKNVTCKVEHESFEKPQLLTVNLTVYYPPEVSISGYDNNWYLGQNEATLTCDARSNPEPTGYNWSTTMGPLPPFAVAQGAQLLIRPVDKPINTTLICNVTNALGARQAELTVQVKEGPPSEHSGISRN

SEQ ID NO: 1568 - protein, 323 aa, Artificial Sequence
  CD155 v137 ECD
WPPPGTGDLVVQAPTQVLGFLGDSVTLPCYLQVPNMEVTHVSQLTWARHGESGSMAVFHQTQGPSYSESKRLEFVAARPGAELRNASLRISGLRVEDEGNYSCMFVTFPQRSRSVDIWLRVLAKPQNTAEVQKVQLTGEPVPMARCVSTGGRPPAQITWHSDLGGMPNTSQVPGFLSGTVTVTSLWILVPSSQVDGKNVTCKVEHESFEKPQLLTVNLTVYYPPEVSISGYDNNWYLGQNEATLTCDARSNPEPTGYNWSTTMGPLPPFAVAQGAQLLIRPVDKPINTTLICNVTNALGARQAELTVQVKEGPPSEHSGISRN

SEQ ID NO: 1569 - protein, 323 aa, Artificial Sequence
  CD155 v138 ECD
WPPPGTGDVVVQAPTQVCGFLGDSVMLPCYLQVPNMEVTHVSQVTWARHGESGSIAVFHQTKGPSYSESKRLEFVAARPGAELRNASLRMSGLRVEDEGNYTCMFVMFPQGSRSVDIWLRVLAKPQNTAEVQKVQLTGEPVPMARCVSTGGRPPAQITWHSDLGGMPNTSQVPGFLSGTVTVTSLWILVPSSQVDGKNVTCKVEHESFEKPQLLTVNLTVYYPPEVSISGYDNNWYLGQNEATLTCDARSNPEPTGYNWSTTMGPLPPFAVAQGAQLLIRPVDKPINTTLICNVTNALGARQAELTVQVKEGPPSEHSGISRN

SEQ ID NO: 1570 - protein, 323 aa, Artificial Sequence
  CD155 v139 ECD
WPPPGTGDIVVQAPTQVTGFLGGSVTLPCYLQVPNMEVTHVSQLTWARHGESGSMAVFHQTQGPSYSESKRLEFVAARPGAELRNASLRMSGLRVEDEGNYTCLFVTFPQRSRSVDIWLRVLAKPQNTAEVQKVQLTGEPVPMARCVSTGGRPPAQITWHSDLGGMPNTSQVPGFLSGTVTVTSLWILVPSSQVDGKNVTCKVEHESFEKPQLLTVNLTVYYPPEVSISGYDNNWYLGQNEATLTCDARSNPEPTGYNWSTTMGPLPPFAVAQGAQLLIRPVDKPINTTLICNVTNALGARQAELTVQVKEGPPSEHSGISRN

SEQ ID NO: 1571 - protein, 323 aa, Artificial Sequence
  CD155 v140 ECD
WPPPGTGDVVVQAPTQVFGFLGDSVTLPCYLQVPNMEVTHVSQLTWARHGESGSMAVFHQTQGPSYSESKRLEFVAARPGAELRNASLRLSGLRAEDEGNYTCMFVTFPQRSRSVDIWLRVLAKPQNTAEVQKVQLTGEPVPMARCVSTGGRPPAQITWHSDLGGMPNTSQVPGFLSGTVTVTSLWILVPSSQVDGKNVTCKVEHESFEKPQLLTVNLTVYYPPEVSISGYDNNWYLGQNEATLTCDARSNPEPTGYNWSTTMGPLPPFAVAQGAQLLIRPVDKPINTTLICNVTNALGARQAELTVQVKEGPPSEHSGISRN

SEQ ID NO: 1572 - protein, 323 aa, Artificial Sequence
  CD155 v141 ECD
WPPPGTGDVVVQAPTQVTGFLGDSVTLPCYLQVPNTEVTHVSQLTWARHGESGSMAVFHQTQGPAYEESKRLEFVAARQGTELRNASLRMSGLRVEDEGNYTCLFVTFPQRSRSVDIWLRVLAKPQNTAEVQKVQLTGEPVPMARCVSTGGRPPAQITWHSDLGGMPNTSQVPGFLSGTVTVTSLWILVPSSQVDGKNVTCKVEHESFEKPQLLTVNLTVYYPPEVSISGYDNNWYLGQNEATLTCDARSNPEPTGYNWSTTMGPLPPFAVAQGAQLLIRPVDKPINTTLICNVTNALGARQAELTVQVKEGPPSEHSGISRN

SEQ ID NO: 1573 - protein, 323 aa, Artificial Sequence
  CD155 v142 ECD
WPPPGTGDLVVQAPTQVTGFLGDSVTLPCYLQVPNMEVTHVSQLTWARHGESGSMAVFHQTRGPSYSESKRLEFVAARPGAELRNASLRMSGLRVEDEGNYTCMFVTFPQRSRSVDIWLRVLAKPQNTAEVQKVQLTGEPVPMARCVSTGGRPPAQITWHSDLGGMPNTSQVPGFLSGTVTVTSLWILVPSSQVDGKNVTCKVEHESFEKPQLLTVNLTVYYPPEVSISGYDNNWYLGQNEATLTCDARSNPEPTGYNWSTTMGPLPPFAVAQGAQLLIRPVDKPINTTLICNVTNALGARQAELTVQVKEGPPSEHSGISRN

SEQ ID NO: 1574 - protein, 323 aa, Artificial Sequence
  CD155 v143 ECD
WPPPGTGDVVVQAPTQVSGFLGDSVTLPCYLQVPNMEVTHVSQLTWARHGESGSMAVFHQTQGPWYAESKRLEFVAARLGAELRNASLRMFGLRVEDEGNYTCQFVTFPQRSRSVDIWLRVLAKPQNTAEVQKVQLTGEPVPMARCVSTGGRPPAQITWHSDLGGMPNTSQVPGFLSGTVTVTSLWILVPSSQVDGKNVTCKVEHESFEKPQLLTVNLTVYYPPEVSISGYDNNWYLGQNEATLTCDARSNPEPTGYNWSTTMGPLPPFAVAQGAQLLIRPVDKPINTTLICNVTNALGARQAELTVQVKEGPPSEHSGISRN

SEQ ID NO: 1575 - protein, 116 aa, Artificial Sequence
  CD155 v143 IgV
PGTGDVVVQAPTQVSGFLGDSVTLPCYLQVPNMEVTHVSQLTWARHGESGSMAVFHQTQGPWYAESKRLEFVAARLGAELRNASLRMFGLRVEDEGNYTCQFVTFPQRSRSVDIWL

SEQ ID NO: 1576 - protein, 122 aa, Artificial Sequence
  CD155 v143 IgV
WPPPGTGDVVVQAPTQVSGFLGDSVTLPCYLQVPNMEVTHVSQLTWARHGESGSMAVFHQTQGPWYAESKRLEFVAARLGAELRNASLRMFGLRVEDEGNYTCQFVTFPQRSRSVDIWLRVL

SEQ ID NO: 1577 - protein, 323 aa, Artificial Sequence
  CD155 v144 ECD
WPPPGTGDVVVQAPTQVTDFLGDSVTLPCYLQVPNTEVTHVSQLTWARHGESGNMAVFHQTQGPSYSESKRLEFVAARPGAEQRNASLRMSGLRVEDEGNYTCLFVMYPQGSRSVDIWLRVLAKPQNTAEVQKVQLTGEPVPMARCVSTGGRPPAQITWHSDLGGMPNTSQVPGFLSGTVTVTSLWILVPSSQVDGKNVTCKVEHESFEKPQLLTVNLTVYYPPEVSISGYDNNWYLGQNEATLTCDARSNPEPTGYNWSTTMGPLPPFAVAQGAQLLIRPVDKPINTTLICNVTNALGARQAELTVQVKEGPPSEHSGISRN

SEQ ID NO: 1578 - protein, 323 aa, Artificial Sequence
  CD155 v145 ECD
WPPPGTGDLVVQAPTQVLGFLGDSVTLPCYLQVPNMEVTHVSQLTWARHGESGSVAVFHQTQGPSYSELKRLEFVAARPGEELRNASLRMSGLRVEDEGNYTCLFVMFPQGSRSVDIWLRVLAKPQNTAEVQKVQLTGEPVPMARCVSTGGRPPAQITWHSDLGGMPNTSQVPGFLSGTVTVTSLWILVPSSQVDGKNVTCKVEHESFEKPQLLTVNLTVYYPPEVSISGYDNNWYLGQNEATLTCDARSNPEPTGYNWSTTMGPLPPFAVAQGAQLLIRPVDKPINTTLICNVTNALGARQAELTVQVKEGPPSEHSGISRN

SEQ ID NO: 1579 - protein, 323 aa, Artificial Sequence
  CD155 v146 ECD
WPPPGTGDVVVQAPTQVFGFLGDSVTLPCYLQVPNMEVTQVSQLTWARHGESGSMAVFHQKKGPSYSESKRLEFVAARPGAELRNASLRMSGLRVEDEGNYTCMFVVFPQGSRSVDIWLRVLAKPQNTAEVQKVQLTGEPVPMARCVSTGGRPPAQITWHSDLGGMPNTSQVPGFLSGTVTVTSLWILVPSSQVDGKNVTCKVEHESFEKPQLLTVNLTVYYPPEVSISGYDNNWYLGQNEATLTCDARSNPEPTGYNWSTTMGPLPPFAVAQGAQLLIRPVDKPINTTLICNVTNALGARQAELTVQVKEGPPSEHSGISRN

SEQ ID NO: 1580 - protein, 323 aa, Artificial Sequence
  CD155 v147 ECD
WPPPGTGDVVVQAPTQVSGFLGDSVTLPCYLRVPNMEVTHVSQLTWARHGESGSMAVFHQTKGPSYSESKRLEFVAAGPGAELRNASLRMSGLRVEDEGNYTCLFVAFPQGSWSVDIWLRVLAKPQNTAEVQKVQLTGEPVPMARCVSTGGRPPAQITWHSDLGGMPNTSQVPGFLSGTVTVTSLWILVPSSQVDGKNVTCKVEHESFEKPQLLTVNLTVYYPPEVSISGYDNNWYLGQNEATLTCDARSNPEPTGYNWSTTMGPLPPFAVAQGAQLLIRPVDKPINTTLICNVTNALGARQAELTVQVKEGPPSEHSGISRN

SEQ ID NO: 1581 - protein, 323 aa, Artificial Sequence
  CD155 v148 ECD
WPPPGTGDVVVHAPTQVTGFSSDSVTLPCYLQVPNMEVTHVSQLTWARHGESGSMAAFHQTRGPSYSESKRLEFVAARPGAELRNASLRMSGLRVEDEGNYTCLFVMFPQGSRSVDIWLRVLAKPQNTAEVQKVQLTGEPVPMARCVSTGGRPPAQITWHSDLGGMPNTSQVPGFLSGTVTVTSLWILVPSSQVDGKNVTCKVEHESFEKPQLLTVNLTVYYPPEVSISGYDNNWYLGQNEATLTCDARSNPEPTGYNWSTTMGPLPPFAVAQGAQLLIRPVDKPINTTLICNVTNALGARQAELTVQVKEGPPSEHSGISRN

SEQ ID NO: 1582 - protein, 323 aa, Artificial Sequence
  CD155 v149 ECD
WPPPGTGDIVVQAPTQVSGFLGDPVTLPCYLQVPNMEVTHVSQLTWARQGESGSMAVYHRTKGPSYSESKRLEFVAARPGAELRNASLRMSGLRVEDEGNYTCLFVMFPQGSRSVDIWLRVLAKPQNTAEVQKVQLTGEPVPMARCVSTGGRPPAQITWHSDLGGMPNTSQVPGFLSGTVTVTSLWILVPSSQVDGKNVTCKVEHESFEKPQLLTVNLTVYYPPEVSISGYDNNWYLGQNEATLTCDARSNPEPTGYNWSTTMGPLPPFAVAQGAQLLIRPVDKPINTTLICNVTNALGARQAELTVQVKEGPPSEHSGISRN

SEQ ID NO: 1583 - protein, 323 aa, Artificial Sequence
  CD155 v150 ECD
WPPPGTGDVVVQAPTQVTGFLGDSVTLPCYLQVPNMEVTHVSQLTCARRGESGSMAVFHQTQGPAYVESKRLEFVTARPGAELRNATLRMFGLRVEDEGNYTCMFVTFPQGSRSVDIWLRVLAKPQNTAEVQKVQLTGEPVPMARCVSTGGRPPAQITWHSDLGGMPNTSQVPGFLSGTVTVTSLWILVPSSQVDGKNVTCKVEHESFEKPQLLTVNLTVYYPPEVSISGYDNNWYLGQNEATLTCDARSNPEPTGYNWSTTMGPLPPFAVAQGAQLLIRPVDKPINTTLICNVTNALGARQAELTVQVKEGPPSEHSGISRN

SEQ ID NO: 1584 - protein, 323 aa, Artificial Sequence
  CD155 v151 ECD
WPPPGTGDVVVQAPTQVSGFLGDSVTLPCYLQVPNMEVTHVTQLTWARHGGSGSMAVFHQTQGPSYSESKRLEFVAARPGAELRNASLRMSWLRVEDEGNYTCLFVMFPQGSRSVDIWLRVLAKPQNTAEVQKVQLTGEPVPMARCVSTGGRPPAQITWHSDLGGMPNTSQVPGFLSGTVTVTSLWILVPSSQVDGKNVTCKVEHESFEKPQLLTVNLTVYYPPEVSISGYDNNWYLGQNEATLTCDARSNPEPTGYNWSTTMGPLPPFAVAQGAQLLIRPVDKPINTTLICNVTNALGARQAELTVQVKEGPPSEHSGISRN

SEQ ID NO: 1585 - protein, 323 aa, Artificial Sequence
  CD155 v152 ECD
WPPPGTGDVFVQAPSQVLGFLGDSVTLPCYLQVPNMEVTHVSQLTWAQHGESGSMAVFHQTQGPSYSESKRLEFVAARPGAELRNASLRMSGLRVEDEGNYTCLFVMFPQGSRSMDIWLRVLAKPQNTAEVQKVQLTGEPVPMARCVSTGGRPPAQITWHSDLGGMPNTSQVPGFLSGTVTVTSLWILVPSSQVDGKNVTCKVEHESFEKPQLLTVNLTVYYPPEVSISGYDNNWYLGQNEATLTCDARSNPEPTGYNWSTTMGPLPPFAVAQGAQLLIRPVDKPINTTLICNVTNALGARQAELTVQVKEGPPSEHSGISRN

SEQ ID NO: 1586 - protein, 323 aa, Artificial Sequence
  CD155 v153 ECD
WPPPGTGDVVVQAPTQVSGFMGDSVTLPCFLQVPDMEVTHVSQLTWARHGESGSMAVFHQTQGPSYSESKRLEFVAARLGAELWNASLRMSGLRVEDEGNYTCLFVMFPQGSRSVGIWLRVLAKPQNTAEVQKVQLTGEPVPMARCVSTGGRPPAQITWHSDLGGMPNTSQVPGFLSGTVTVTSLWILVPSSQVDGKNVTCKVEHESFEKPQLLTVNLTVYYPPEVSISGYDNNWYLGQNEATLTCDARSNPEPTGYNWSTTMGPLPPFAVAQGAQLLIRPVDKPINTTLICNVTNALGARQAELTVQVKEGPPSEHSGISRN

SEQ ID NO: 1587 - protein, 323 aa, Artificial Sequence
  CD155 v154 ECD
WPPPGTGDVVVQAPTQVFGFLGDSVTLPCYLQVPNMEVTHVSQLTWARHGVSGGMAVFHRTQGPSYSESKRLEFVAARQGAGLRNATLRISRLRVEDEGNYTCLFVMFPQGSRSVDIWLRVLAKPQNTAEVQKVQLTGEPVPMARCVSTGGRPPAQITWHSDLGGMPNTSQVPGFLSGTVTVTSLWILVPSSQVDGKNVTCKVEHESFEKPQLLTVNLTVYYPPEVSISGYDNNWYLGQNEATLTCDARSNPEPTGYNWSTTMGPLPPFAVAQGAQLLIRPVDKPINTTLICNVTNALGARQAELTVQVKEGPPSEHSGISRN

SEQ ID NO: 1588 - protein, 323 aa, Artificial Sequence
  CD155 v155 ECD
WPPPGTGDVVVQAPTHVFGFLGDSVTLPCYLQVPNMEVTHVSQLTWARHGESGSMAVFHQTQGPSYSESKRLEFVAARLGAELRNASLRMSGLRVEDEGNYTCLFVMFPQGSRSVDIWLRVLAKPQNTAEVQKVQLTGEPVPMARCVSTGGRPPAQITWHSDLGGMPNTSQVPGFLSGTVTVTSLWILVPSSQVDGKNVTCKVEHESFEKPQLLTVNLTVYYPPEVSISGYDNNWYLGQNEATLTCDARSNPEPTGYNWSTTMGPLPPFAVAQGAQLLIRPVDKPINTTLICNVTNALGARQAELTVQVKEGPPSEHSGISRN

SEQ ID NO: 1589 - protein, 323 aa, Artificial Sequence
  CD155 v156 ECD
WPPPGTGDVVVQAPTQVTGFLGGSVTLPCYLQVPNMEVTHVSQLTWARHGESGSMAVFHRTQGPSYLESKRLEFVAARPGAELRNASLRMSGLRVEDEGNYTCLFVMFPQGSRSADIWLRVLAKPQNTAEVQKVQLTGEPVPMARCVSTGGRPPAQITWHSDLGGMPNTSQVPGFLSGTVTVTSLWILVPSSQVDGKNVTCKVEHESFEKPQLLTVNLTVYYPPEVSISGYDNNWYLGQNEATLTCDARSNPEPTGYNWSTTMGPLPPFAVAQGAQLLIRPVDKPINTTLICNVTNALGARQAELTVQVKEGPPSEHSGISRN

SEQ ID NO: 1590 - protein, 323 aa, Artificial Sequence
  CD155 v157 ECD
WPPPGTGGIVAQAPTQVTGFLGDSVMLPCYLQVPNMEVTHVSQLTWARHGEPGSMAVFHQTQGPSYSESKRLEFVAARPGAELRNASLRMSALRVEDEGNYTCLFVLFPQGSRSADIWLRVLAKPQNTAEVQKVQLTGEPVPMARCVSTGGRPPAQITWHSDLGGMPNTSQVPGFLSGTVTVTSLWILVPSSQVDGKNVTCKVEHESFEKPQLLTVNLTVYYPPEVSISGYDNNWYLGQNEATLTCDARSNPEPTGYNWSTTMGPLPPFAVAQGAQLLIRPVDKPINTTLICNVTNALGARQAELTVQVKEGPPSEHSGISRN

SEQ ID NO: 1591 - protein, 323 aa, Artificial Sequence
  CD155 v158 ECD
WPPPGTGDIVVQAPTQVFGFLGDSVTLPCYLQVPNMEVTHVSQLTWERHSESGSMAVFHQTQGPSYSGSKRLEFVAARPGAELRNASLRMSGLRVEDEGNYTCLFVMFPQGSRSVDIWLRVLAKPQNTAEVQKVQLTGEPVPMARCVSTGGRPPAQITWHSDLGGMPNTSQVPGFLSGTVTVTSLWILVPSSQVDGKNVTCKVEHESFEKPQLLTVNLTVYYPPEVSISGYDNNWYLGQNEATLTCDARSNPEPTGYNWSTTMGPLPPFAVAQGAQLLIRPVDKPINTTLICNVTNALGARQAELTVQVKEGPPSEHSGISRN

SEQ ID NO: 1592 - protein, 323 aa, Artificial Sequence
  CD155 v159 ECD
WPPPGTGDVVVQAPTQVSGFLGDSVTLPCYLQVPNMEVTHVSQLTWARHGESGSIAVFHQTKGPSYSEPKRLEFVAARPGAELRNASLRMSGLRVEDEGNYTCLFVMFPQGSRSVDIWLRVLAKPQNTAEVQKVQLTGEPVPMARCVSTGGRPPAQITWHSDLGGMPNTSQVPGFLSGTVTVTSLWILVPSSQVDGKNVTCKVEHESFEKPQLLTVNLTVYYPPEVSISGYDNNWYLGQNEATLTCDARSNPEPTGYNWSTTMGPLPPFAVAQGAQLLIRPVDKPINTTLICNVTNALGARQAELTVQVKEGPPSEHSGISRN

SEQ ID NO: 1593 - protein, 323 aa, Artificial Sequence
  CD155 v160 ECD
WPPPGTGDVVVQAPTQVTGFLGDSVTLPCYLQVPNMEVSHVSQLTWARHGEPGRMAVFHQTQGPSYSESKRLEFVAARPGAELRNASLRMSGLRVEDEGNYTCLFVMFPQGSRSVDIWLRVLAKPQNTAEVQKVQLTGEPVPMARCVSTGGRPPAQITWHSDLGGMPNTSQVPGFLSGTVTVTSLWILVPSSQVDGKNVTCKVEHESFEKPQLLTVNLTVYYPPEVSISGYDNNWYLGQNEATLTCDARSNPEPTGYNWSTTMGPLPPFAVAQGAQLLIRPVDKPINTTLICNVTNALGARQAELTVQVKEGPPSEHSGISRN

SEQ ID NO: 1594 - protein, 323 aa, Artificial Sequence
  CD155 v161 ECD
WPPPGTGDVVVQAPTQVSGFLGNSVTLPCYLQVPNMEVTHVSQLTWARHGESGSMAVFHQTQGPSYSESKRLEFVAARPGAELRNASLRMSGLRVEDEGNYTCLFVMFPQGSRNVDIWLRVLAKPQNTAEVQKVQLTGEPVPMARCVSTGGRPPAQITWHSDLGGMPNTSQVPGFLSGTVTVTSLWILVPSSQVDGKNVTCKVEHESFEKPQLLTVNLTVYYPPEVSISGYDNNWYLGQNEATLTCDARSNPEPTGYNWSTTMGPLPPFAVAQGAQLLIRPVDKPINTTLICNVTNALGARQAELTVQVKEGPPSEHSGISRN

SEQ ID NO: 1595 - protein, 323 aa, Artificial Sequence
  CD155 v162 ECD
WPPPGTGDVVVQAPTQVSGFLGDSVTLPCYLQVSNMEVTHVSQLTWARHGVSGSMAVFHQTQGPSYSESKRLEFVAARPGAELRNASLRMSGLRVEDEGNYTCLFVTFPQRSRSVDIWLRVLAKPQNTAEVQKVQLTGEPVPMARCVSTGGRPPAQITWHSDLGGMPNTSQVPGFLSGTVTVTSLWILVPSSQVDGKNVTCKVEHESFEKPQLLTVNLTVYYPPEVSISGYDNNWYLGQNEATLTCDARSNPEPTGYNWSTTMGPLPPFAVAQGAQLLIRPVDKPINTTLICNVTNALGARQAELTVQVKEGPPSEHSGISRN

SEQ ID NO: 1596 - protein, 323 aa, Artificial Sequence
  CD155 v163 ECD
WPPPGTGDVVVQAPTQVSGFLGDSVTLPCYLQVPNMEVTHVSQLTWARHGESGSMAVFNQTQGPSYSESKRLEFAAARPGTELRNASLRMSGLRVEDEGNYTCMFVMFPQGSRSVDIWLRVLAKPQNTAEVQKVQLTGEPVPMARCVSTGGRPPAQITWHSDLGGMPNTSQVPGFLSGTVTVTSLWILVPSSQVDGKNVTCKVEHESFEKPQLLTVNLTVYYPPEVSISGYDNNWYLGQNEATLTCDARSNPEPTGYNWSTTMGPLPPFAVAQGAQLLIRPVDKPINTTLICNVTNALGARQAELTVQVKEGPPSEHSGISRN

SEQ ID NO: 1597 - protein, 323 aa, Artificial Sequence
  CD155 v164 ECD
WPPPGTGDVVVQAPTQVSGFLGDSVTLPCYLQVPNMEVTHVSQLTRARHGESGSMAVFHQTQGPSYSDSKRLEFVAARPGAELRNASLRMSGLRVEDEGNYTCLFVMFPQGSGSVDIWLRVLAKPQNTAEVQKVQLTGEPVPMARCVSTGGRPPAQITWHSDLGGMPNTSQVPGFLSGTVTVTSLWILVPSSQVDGKNVTCKVEHESFEKPQLLTVNLTVYYPPEVSISGYDNNWYLGQNEATLTCDARSNPEPTGYNWSTTMGPLPPFAVAQGAQLLIRPVDKPINTTLICNVTNALGARQAELTVQVKEGPPSEHSGISRN

SEQ ID NO: 1598 - protein, 323 aa, Artificial Sequence
  CD155 v165 ECD
WPPPGTGDLVVQAPTQVFGFLGDSVTLPCYLQVPNMEVTHVSQLAWARHGESGSMAVFHQTQGPAYVESKRLEFVAAKVGAELRNASLRMSGLRVEDEGNYTCLFVMFPQGSRTVDIWLRVLAKPQNTAEVQKVQLTGEPVPMARCVSTGGRPPAQITWHSDLGGMPNTSQVPGFLSGTVTVTSLWILVPSSQVDGKNVTCKVEHESFEKPQLLTVNLTVYYPPEVSISGYDNNWYLGQNEATLTCDARSNPEPTGYNWSTTMGPLPPFAVAQGAQLLIRPVDKPINTTLICNVTNALGARQAELTVQVKEGPPSEHSGISRN

SEQ ID NO: 1599 - protein, 323 aa, Artificial Sequence
  CD155 v166 ECD
WPPPGTGDVVVQAPTQVTGFLGDSVTLPCYLQVPNMEVTHVSQLTWARHGESGSLAVFHQRQGPSYSESKRLEFVAARPGAELRNASLRMSGLRVEDEGNYTCLFIMFPQGSRSVDIWLRVLAKPQNTAEVQKVQLTGEPVPMARCVSTGGRPPAQITWHSDLGGMPNTSQVPGFLSGTVTVTSLWILVPSSQVDGKNVTCKVEHESFEKPQLLTVNLTVYYPPEVSISGYDNNWYLGQNEATLTCDARSNPEPTGYNWSTTMGPLPPFAVAQGAQLLIRPVDKPINTTLICNVTNALGARQAELTVQVKEGPPSEHSGISRN

SEQ ID NO: 1600 - protein, 323 aa, Artificial Sequence
  CD155 v167 ECD
WPPPGTGDVVVQAPIQVSGFLGDSVTLPCYLQMPFMEVSHVSQLTWARHGESGSLAVFHQTQGPSYSESKRLEFVAASPGAELRNASLRMSGLRVEDEGNYTCLFVMFPQGSRSVDIWLRVLAKPQNTAEVQKVQLTGEPVPMARCVSTGGRPPAQITWHSDLGGMPNTSQVPGFLSGTVTVTSLWILVPSSQVDGKNVTCKVEHESFEKPQLLTVNLTVYYPPEVSISGYDNNWYLGQNEATLTCDARSNPEPTGYNWSTTMGPLPPFAVAQGAQLLIRPVDKPINTTLICNVTNALGARQAELTVQVKEGPPSEHSGISRN

SEQ ID NO: 1601 - protein, 323 aa, Artificial Sequence
  CD155 v168 ECD
WPPPGTGDVVVQAPTQVSGFLGDSVTLPCYLQVPNMEVTHVSQLTWARHGESGSMAVFHQTKGPSYSESERLEFVAARPGAELRNASLRMSELRVEDEGNYTCLFVTFPQGSWSVDIWLRVLAKPQNTAEVQKVQLTGEPVPMARCVSTGGRPPAQITWHSDLGGMPNTSQVPGFLSGTVTVTSLWILVPSSQVDGKNVTCKVEHESFEKPQLLTVNLTVYYPPEVSISGYDNNWYLGQNEATLTCDARSNPEPTGYNWSTTMGPLPPFAVAQGAQLLIRPVDKPINTTLICNVTNALGARQAELTVQVKEGPPSEHSGISRN

SEQ ID NO: 1602 - protein, 323 aa, Artificial Sequence
  CD155 v169 ECD
WPPPGTGDVVVQAPTQVFGILGDSVMLPCYLQVPNMEVTHVSQLTWVRHGKSGSMAVFHQTQGPSYSESKRLEFVAARPGAELRNASLRMSGLRVEDEGNYTCLFVTFPQGSRSVDIWLRVLAKPQNTAEVQKVQLTGEPVPMARCVSTGGRPPAQITWHSDLGGMPNTSQVPGFLSGTVTVTSLWILVPSSQVDGKNVTCKVEHESFEKPQLLTVNLTVYYPPEVSISGYDNNWYLGQNEATLTCDARSNPEPTGYNWSTTMGPLPPFAVAQGAQLLIRPVDKPINTTLICNVTNALGARQAELTVQVKEGPPSEHSGISRN

SEQ ID NO: 1603 - protein, 323 aa, Artificial Sequence
  CD155 v170 ECD
WPPPGTGDVVVQAPTQVTGFLGASVTLPCYLQVPNMEVTHVSQLTWARHGESGSMAVFHHTQGPSYSESKRLEFVAARPGAELRNASLRVSGLRVEDEGNYTCLFVMFPQGSRSVDIWLRVLAKPQNTAEVQKVQLTGEPVPMARCVSTGGRPPAQITWHSDLGGMPNTSQVPGFLSGTVTVTSLWILVPSSQVDGKNVTCKVEHESFEKPQLLTVNLTVYYPPEVSISGYDNNWYLGQNEATLTCDARSNPEPTGYNWSTTMGPLPPFAVAQGAQLLIRPVDKPINTTLICNVTNALGARQAELTVQVKEGPPSEHSGISRN

SEQ ID NO: 1604 - protein, 323 aa, Artificial Sequence
  CD155 v171 ECD
WPPPGTGDVVVQAPTQVSGFLGGSVTLPRYLQVPDMGVTHVSQLTWARHGESGSIAVFHQTKGPAYGESKRLEFVAAGPGAELRNASLRMSGLRVEDEGNYTCMFVMFPRGSRSVDIWLRVLAKPQNTAEVQKVQLTGEPVPMARCVSTGGRPPAQITWHSDLGGMPNTSQVPGFLSGTVTVTSLWILVPSSQVDGKNVTCKVEHESFEKPQLLTVNLTVYYPPEVSISGYDNNWYLGQNEATLTCDARSNPEPTGYNWSTTMGPLPPFAVAQGAQLLIRPVDKPINTTLICNVTNALGARQAELTVQVKEGPPSEHSGISRN

SEQ ID NO: 1605 - protein, 323 aa, Artificial Sequence
  CD155 v172 ECD
WPPPGTGDVVVQEPTQVSGFLGDSVTLPCYLQVPNREVTHVSQLTWARHGESGSMAVFHQTKGPSYTESKRLEFVAARPGAELRDASLRMSGLRVEDEGNYTCLFVMFPQGSRSVDIWLRVLAKPQNTAEVQKVQLTGEPVPMARCVSTGGRPPAQITWHSDLGGMPNTSQVPGFLSGTVTVTSLWILVPSSQVDGKNVTCKVEHESFEKPQLLTVNLTVYYPPEVSISGYDNNWYLGQNEATLTCDARSNPEPTGYNWSTTMGPLPPFAVAQGAQLLIRPVDKPINTTLICNVTNALGARQAELTVQVKEGPPSEHSGISRN

SEQ ID NO: 1606 - protein, 323 aa, Artificial Sequence
  CD155 v173 ECD
WPPPGTGDIVVQAPTQVTGFLGDSVTLPCYLQVPNMEVTHVSQLTWARRGESGSMAVFHQTQGPSYSESKRLEFVAARPGAELRDASLRMSGLRVEDEGNYTCTFVMFPQGSRSVDIWLRVLAKPQNTAEVQKVQLTGEPVPMARCVSTGGRPPAQITWHSDLGGMPNTSQVPGFLSGTVTVTSLWILVPSSQVDGKNVTCKVEHESFEKPQLLTVNLTVYYPPEVSISGYDNNWYLGQNEATLTCDARSNPEPTGYNWSTTMGPLPPFAVAQGAQLLIRPVDKPINTTLICNVTNALGARQAELTVQVKEGPPSEHSGISRN

SEQ ID NO: 1607 - protein, 323 aa, Artificial Sequence
  CD155 v174 ECD
WPPPGTGDAVVQAPTQVFGFLGDSVTLPCYLQVPNMEVTHVSQLTWARHGESGSMAVFHQSLGPSYSESKRLEFVAARPGAELRNASLRMSGLRVEDEGNYTCLFVTFPQRSRSVDIWLRVLAKPQNTAEVQKVQLTGEPVPMARCVSTGGRPPAQITWHSDLGGMPNTSQVPGFLSGTVTVTSLWILVPSSQVDGKNVTCKVEHESFEKPQLLTVNLTVYYPPEVSISGYDNNWYLGQNEATLTCDARSNPEPTGYNWSTTMGPLPPFAVAQGAQLLIRPVDKPINTTLICNVTNALGARQAELTVQVKEGPPSEHSGISRN

SEQ ID NO: 1608 - protein, 323 aa, Artificial Sequence
  CD155 v175 ECD
WPPPGTGEVVVQAPTQVTGFLGDSVTLPCYLQVPNMEVTHVSQLTWARHGESGSMAVFHQAQGPSYSESKRLEFVAARPGAELRNASLRMSGLRVEDEGNYTCLFVMFPQGSRSVDIWLRVLAKPQNTAEVQKVQLTGEPVPMARCVSTGGRPPAQITWHSDLGGMPNTSQVPGFLSGTVTVTSLWILVPSSQVDGKNVTCKVEHESFEKPQLLTVNLTVYYPPEVSISGYDNNWYLGQNEATLTCDARSNPEPTGYNWSTTMGPLPPFAVAQGAQLLIRPVDKPINTTLICNVTNALGARQAELTVQVKEGPPSEHSGISRN

SEQ ID NO: 1609 - protein, 323 aa, Artificial Sequence
  CD155 v176 ECD
WPPPGTGDVVVQAPTQVSGFLGDSVTLPCYLQVPNMEVTHASQLTWARRGESGCMAVFHQTQGPSYSESKRLEFVAARSGAELRYASPRMSGLRVEDEGNYTCMFVMFPQGSRSVDIWLRVLAKPQNTAEVQKVQLTGEPVPMARCVSTGGRPPAQITWHSDLGGMPNTSQVPGFLSGTVTVTSLWILVPSSQVDGKNVTCKVEHESFEKPQLLTVNLTVYYPPEVSISGYDNNWYLGQNEATLTCDARSNPEPTGYNWSTTMGPLPPFAVAQGAQLLIRPVDKPINTTLICNVTNALGARQAELTVQVKEGPPSEHSGISRN

SEQ ID NO: 1610 - protein, 323 aa, Artificial Sequence
  CD155 v177 ECD
WPPPGTGDVVEQAPTQVHGYLGDSETLPCYLQVPSMEVTHVSQLTWARRGESGSMAVFHQTQGPSYSESKRLEFVAARPGAELRNASLRMSGLRVEDEGNYTCLFVMFPQRSRSVDIWLRVLAKPQNTAEVQKVQLTGEPVPMARCVSTGGRPPAQITWHSDLGGMPNTSQVPGFLSGTVTVTSLWILVPSSQVDGKNVTCKVEHESFEKPQLLTVNLTVYYPPEVSISGYDNNWYLGQNEATLTCDARSNPEPTGYNWSTTMGPLPPFAVAQGAQLLIRPVDKPINTTLICNVTNALGARQAELTVQVKEGPPSEHSGISRN

SEQ ID NO: 1611 - protein, 323 aa, Artificial Sequence
  CD155 v178 ECD
WPPPGTGDVVAQAPTQVFGFLGASVTLPCYLQVPNMEVTHVSQLTWARHGESGSMAVFHQTQGPSYSESKRLEFVAARPDAELRNASLRMFGLRAEDEGNYTCLFVMFPQGSRSVDIWLRVLAKPQNTAEVQKVQLTGEPVPMARCVSTGGRPPAQITWHSDLGGMPNTSQVPGFLSGTVTVTSLWILVPSSQVDGKNVTCKVEHESFEKPQLLTVNLTVYYPPEVSISGYDNNWYLGQNEATLTCDARSNPEPTGYNWSTTMGPLPPFAVAQGAQLLIRPVDKPINTTLICNVTNALGARQAELTVQVKEGPPSEHSGISRN

SEQ ID NO: 1612 - protein, 323 aa, Artificial Sequence
  CD155 v179 ECD
WPPPGTGDVVVQAPTQVSGFLGDSVTLPCYLQVPNMEVTHVSQLTWARHGESGSMAVFHQTQGPSYSESRRLEFVAARPGAELRNASLRMSGLRVEDEGNYTCLFVTFPQRSRSVDIWLRVLAKPQNTAEVQKVQLTGEPVPMARCVSTGGRPPAQITWHSDLGGMPNTSQVPGFLSGTVTVTSLWILVPSSQVDGKNVTCKVEHESFEKPQLLTVNLTVYYPPEVSISGYDNNWYLGQNEATLTCDARSNPEPTGYNWSTTMGPLPPFAVAQGAQLLIRPVDKPINTTLICNVTNALGARQAELTVQVKEGPPSEHSGISRN

SEQ ID NO: 1613 - protein, 323 aa, Artificial Sequence
  CD155 v180 ECD
WPPPGTGDLVMQAPTQVSGFLGDSVTLPCYLQVPSMEVTHVSQLTWARHGESGGMAVFHQTKGPSYSESKRLEFVAARPGAELRNASLRMFGLRVEDEGNYTCMFVMFPQGSRSMDIWLRVLAKPQNTAEVQKVQLTGEPVPMARCVSTGGRPPAQITWHSDLGGMPNTSQVPGFLSGTVTVTSLWILVPSSQVDGKNVTCKVEHESFEKPQLLTVNLTVYYPPEVSISGYDNNWYLGQNEATLTCDARSNPEPTGYNWSTTMGPLPPFAVAQGAQLLIRPVDKPINTTLICNVTNALGARQAELTVQVKEGPPSEHSGISRN

SEQ ID NO: 1614 - protein, 323 aa, Artificial Sequence
  CD155 v181 ECD
WPPPGTGDLVVQAPTQVYGFLGDSATLPCYLQVPNMEGTHVSQLTWARHGESGSVAVFHQTQGPSYSESKRLEFVATRPGAELRNASLRISGLRVEDEGNYTCMFVTFPQGSRSVDIWLRVLAKPQNTAEVQKVQLTGEPVPMARCVSTGGRPPAQITWHSDLGGMPNTSQVPGFLSGTVTVTSLWILVPSSQVDGKNVTCKVEHESFEKPQLLTVNLTVYYPPEVSISGYDNNWYLGQNEATLTCDARSNPEPTGYNWSTTMGPLPPFAVAQGAQLLIRPVDKPINTTLICNVTNALGARQAELTVQVKEGPPSEHSGISRN

SEQ ID NO: 1615 - protein, 323 aa, Artificial Sequence
  CD155 v182 ECD
WPPPGTGDVGVQAPTQVTGFLGDSVTLPCYLQVPNMEVTHVSQLTWARHGESGSMAVFHQTQGPSYSESKRQEFVAARPGAELRNASLRMSGLRVEDEGNYTCLFVMFPQGSRSVDIWLRVLAKPQNTAEVQKVQLTGEPVPMARCVSTGGRPPAQITWHSDLGGMPNTSQVPGFLSGTVTVTSLWILVPSSQVDGKNVTCKVEHESFEKPQLLTVNLTVYYPPEVSISGYDNNWYLGQNEATLTCDARSNPEPTGYNWSTTMGPLPPFAVAQGAQLLIRPVDKPINTTLICNVTNALGARQAELTVQVKEGPPSEHSGISRN

SEQ ID NO: 1616 - protein, 323 aa, Artificial Sequence
  CD155 v183 ECD
WPPPGTGDVVVQAPTQVSGFLGDSVTLPCYLQVPNMEVTHVSQLTWARHGESGSMAVFRQTQGPSYSESKRLEFVGASPGAELRNASLRMFGLRVEDEGNYTCLFVTFPQGSRSVDIWLRVLAKPQNTAEVQKVQLTGEPVPMARCVSTGGRPPAQITWHSDLGGMPNTSQVPGFLSGTVTVTSLWILVPSSQVDGKNVTCKVEHESFEKPQLLTVNLTVYYPPEVSISGYDNNWYLGQNEATLTCDARSNPEPTGYNWSTTMGPLPPFAVAQGAQLLIRPVDKPINTTLICNVTNALGARQAELTVQVKEGPPSEHSGISRN

SEQ ID NO: 1617 - protein, 323 aa, Artificial Sequence
  CD155 v184 ECD
WPPPGTGDAVVQAPTQVSGFLGDSVTLPCYLQVPNTEVTHVSQLTWARHGESGSMAVFHQTQGPGYSESKRLEFVAARPGAELRNASLRMSGLRVEDEGNYTCTFVTFPQRIRSVDIWLRVLAKPQNTAEVQKVQLTGEPVPMARCVSTGGRPPAQITWHSDLGGMPNTSQVPGFLSGTVTVTSLWILVPSSQVDGKNVTCKVEHESFEKPQLLTVNLTVYYPPEVSISGYDNNWYLGQNEATLTCDARSNPEPTGYNWSTTMGPLPPFAVAQGAQLLIRPVDKPINTTLICNVTNALGARQAELTVQVKEGPPSEHSGISRN

SEQ ID NO: 1618 - protein, 323 aa, Artificial Sequence
  CD155 v185 ECD
WPPPGTGDVVVQAPTQVTGFLGDSVTLPCYLQVPNMEVTHVSQLTWARHGEAGSMAAFHRTKGPCYSESKRLEFVAARPGAELRNASLRMTGLRVEDEGYYTCLFVMFPQGSRSVDIWLRVLAKPQNTAEVQKVQLTGEPVPMARCVSTGGRPPAQITWHSDLGGMPNTSQVPGFLSGTVTVTSLWILVPSSQVDGKNVTCKVEHESFEKPQLLTVNLTVYYPPEVSISGYDNNWYLGQNEATLTCDARSNPEPTGYNWSTTMGPLPPFAVAQGAQLLIRPVDKPINTTLICNVTNALGARQAELTVQVKEGPPSEHSGISRN

SEQ ID NO: 1619 - protein, 323 aa, Artificial Sequence
  CD155 v186 ECD
WPPPGTGDVVAQAPTQVFGFLGDSVTLPCYLQVPDMEVTHVSQLTWERHGESGSMAVFHQTKGPSYSESKRLEFVAARPGAELRNASLRMSGLRVEDEDNYTCLFVMFPQGSRNVDIWLRVLAKPQNTAEVQKVQLTGEPVPMARCVSTGGRPPAQITWHSDLGGMPNTSQVPGFLSGTVTVTSLWILVPSSQVDGKNVTCKVEHESFEKPQLLTVNLTVYYPPEVSISGYDNNWYLGQNEATLTCDARSNPEPTGYNWSTTMGPLPPFAVAQGAQLLIRPVDKPINTTLICNVTNALGARQAELTVQVKEGPPSEHSGISRN

SEQ ID NO: 1620 - protein, 323 aa, Artificial Sequence
  CD155 v187 ECD
WPPPGTGDVVAQAPTQVTGFLGDSVTLPCYLQVPSMEVTHVSQLTWARHGESGSMAVFHQTQGPSYSESKRLEFVAARPGAELRNATLRMSGLRVEDEGNYTCLFVTFPQGSRSVDIWLRVLAKPQNTAEVQKVQLTGEPVPMARCVSTGGRPPAQITWHSDLGGMPNTSQVPGFLSGTVTVTSLWILVPSSQVDGKNVTCKVEHESFEKPQLLTVNLTVYYPPEVSISGYDNNWYLGQNEATLTCDARSNPEPTGYNWSTTMGPLPPFAVAQGAQLLIRPVDKPINTTLICNVTNALGARQAELTVQVKEGPPSEHSGISRN

SEQ ID NO: 1621 - protein, 323 aa, Artificial Sequence
  CD155 v188 ECD
WPPPGTGDDVMLAPTQVSGFLGDSVTLPCYLQVPNMVVTHVSQLTWARHGESGSIAVFHRTQGPSYSESQRLEFVAARPGAELRNASLRMSGLRVEDEGNYTCMFVMFPQGSRSVDIWLRVLAKPQNTAEVQKVQLTGEPVPMARCVSTGGRPPAQITWHSDLGGMPNTSQVPGFLSGTVTVTSLWILVPSSQVDGKNVTCKVEHESFEKPQLLTVNLTVYYPPEVSISGYDNNWYLGQNEATLTCDARSNPEPTGYNWSTTMGPLPPFAVAQGAQLLIRPVDKPINTTLICNVTNALGARQAELTVQVKEGPPSEHSGISRN

SEQ ID NO: 1622 - protein, 323 aa, Artificial Sequence
  CD155 v189 ECD
WPPPGTGDVVVQAPSQVSGFLGDSVTLPCHLLVPNMEVTHVSQLTWARHGESGSMAVFHQTRGPSYSESKRLEFVAARPGAELRNASLRMSGLRVEDEGNYTCLFVMFPQGSRSVDIWLRVLAKPQNTAEVQKVQLTGEPVPMARCVSTGGRPPAQITWHSDLGGMPNTSQVPGFLSGTVTVTSLWILVPSSQVDGKNVTCKVEHESFEKPQLLTVNLTVYYPPEVSISGYDNNWYLGQNEATLTCDARSNPEPTGYNWSTTMGPLPPFAVAQGAQLLIRPVDKPINTTLICNVTNALGARQAELTVQVKEGPPSEHSGISRN

SEQ ID NO: 1623 - protein, 116 aa, Artificial Sequence
  CD155 v144 IgV
PGTGDVVVQAPTQVTDFLGDSVTLPCYLQVPNTEVTHVSQLTWARHGESGNMAVFHQTQGPSYSESKRLEFVAARPGAEQRNASLRMSGLRVEDEGNYTCLFVMYPQGSRSVDIWL

SEQ ID NO: 1624 - protein, 116 aa, Artificial Sequence
  CD155 v145 IgV
PGTGDLVVQAPTQVLGFLGDSVTLPCYLQVPNMEVTHVSQLTWARHGESGSVAVFHQTQGPSYSELKRLEFVAARPGEELRNASLRMSGLRVEDEGNYTCLFVMFPQGSRSVDIWL

SEQ ID NO: 1625 - protein, 116 aa, Artificial Sequence
  CD155 v146 IgV
PGTGDVVVQAPTQVFGFLGDSVTLPCYLQVPNMEVTQVSQLTWARHGESGSMAVFHQKKGPSYSESKRLEFVAARPGAELRNASLRMSGLRVEDEGNYTCMFVVFPQGSRSVDIWL

SEQ ID NO: 1626 - protein, 116 aa, Artificial Sequence
  CD155 v147 IgV
PGTGDVVVQAPTQVSGFLGDSVTLPCYLRVPNMEVTHVSQLTWARHGESGSMAVFHQTKGPSYSESKRLEFVAAGPGAELRNASLRMSGLRVEDEGNYTCLFVAFPQGSWSVDIWL

SEQ ID NO: 1627 - protein, 116 aa, Artificial Sequence
  CD155 v148 IgV
PGTGDVVVHAPTQVTGFSSDSVTLPCYLQVPNMEVTHVSQLTWARHGESGSMAAFHQTRGPSYSESKRLEFVAARPGAELRNASLRMSGLRVEDEGNYTCLFVMFPQGSRSVDIWL

SEQ ID NO: 1628 - protein, 116 aa, Artificial Sequence
  CD155 v149 IgV
PGTGDIVVQAPTQVSGFLGDPVTLPCYLQVPNMEVTHVSQLTWARQGESGSMAVYHRTKGPSYSESKRLEFVAARPGAELRNASLRMSGLRVEDEGNYTCLFVMFPQGSRSVDIWL

SEQ ID NO: 1629 - protein, 116 aa, Artificial Sequence
  CD155 v150 IgV
PGTGDVVVQAPTQVTGFLGDSVTLPCYLQVPNMEVTHVSQLTCARRGESGSMAVFHQTQGPAYVESKRLEFVTARPGAELRNATLRMFGLRVEDEGNYTCMFVTFPQGSRSVDIWL

SEQ ID NO: 1630 - protein, 116 aa, Artificial Sequence
  CD155 v151 IgV
PGTGDVVVQAPTQVSGFLGDSVTLPCYLQVPNMEVTHVTQLTWARHGGSGSMAVFHQTQGPSYSESKRLEFVAARPGAELRNASLRMSWLRVEDEGNYTCLFVMFPQGSRSVDIWL

SEQ ID NO: 1631 - protein, 116 aa, Artificial Sequence
  CD155 v152 IgV
PGTGDVFVQAPSQVLGFLGDSVTLPCYLQVPNMEVTHVSQLTWAQHGESGSMAVFHQTQGPSYSESKRLEFVAARPGAELRNASLRMSGLRVEDEGNYTCLFVMFPQGSRSMDIWL

SEQ ID NO: 1632 - protein, 116 aa, Artificial Sequence
  CD155 v153 IgV
PGTGDVVVQAPTQVSGFMGDSVTLPCFLQVPDMEVTHVSQLTWARHGESGSMAVFHQTQGPSYSESKRLEFVAARLGAELWNASLRMSGLRVEDEGNYTCLFVMFPQGSRSVGIWL

SEQ ID NO: 1633 - protein, 116 aa, Artificial Sequence
  CD155 v154 IgV
PGTGDVVVQAPTQVFGFLGDSVTLPCYLQVPNMEVTHVSQLTWARHGVSGGMAVFHRTQGPSYSESKRLEFVAARQGAGLRNATLRISRLRVEDEGNYTCLFVMFPQGSRSVDIWL

SEQ ID NO: 1634 - protein, 116 aa, Artificial Sequence
  CD155 v155 IgV
PGTGDVVVQAPTHVFGFLGDSVTLPCYLQVPNMEVTHVSQLTWARHGESGSMAVFHQTQGPSYSESKRLEFVAARLGAELRNASLRMSGLRVEDEGNYTCLFVMFPQGSRSVDIWL

SEQ ID NO: 1635 - protein, 116 aa, Artificial Sequence
  CD155 v156 IgV
PGTGDVVVQAPTQVTGFLGGSVTLPCYLQVPNMEVTHVSQLTWARHGESGSMAVFHRTQGPSYLESKRLEFVAARPGAELRNASLRMSGLRVEDEGNYTCLFVMFPQGSRSADIWL

SEQ ID NO: 1636 - protein, 116 aa, Artificial Sequence
  CD155 v157 IgV
PGTGGIVAQAPTQVTGFLGDSVMLPCYLQVPNMEVTHVSQLTWARHGEPGSMAVFHQTQGPSYSESKRLEFVAARPGAELRNASLRMSALRVEDEGNYTCLFVLFPQGSRSADIWL

SEQ ID NO: 1637 - protein, 116 aa, Artificial Sequence
  CD155 v158 IgV
PGTGDIVVQAPTQVFGFLGDSVTLPCYLQVPNMEVTHVSQLTWERHSESGSMAVFHQTQGPSYSGSKRLEFVAARPGAELRNASLRMSGLRVEDEGNYTCLFVMFPQGSRSVDIWL

SEQ ID NO: 1638 - protein, 116 aa, Artificial Sequence
  CD155 v159 IgV
PGTGDVVVQAPTQVSGFLGDSVTLPCYLQVPNMEVTHVSQLTWARHGESGSIAVFHQTKGPSYSEPKRLEFVAARPGAELRNASLRMSGLRVEDEGNYTCLFVMFPQGSRSVDIWL

SEQ ID NO: 1639 - protein, 116 aa, Artificial Sequence
  CD155 v160 IgV
PGTGDVVVQAPTQVTGFLGDSVTLPCYLQVPNMEVSHVSQLTWARHGEPGRMAVFHQTQGPSYSESKRLEFVAARPGAELRNASLRMSGLRVEDEGNYTCLFVMFPQGSRSVDIWL

SEQ ID NO: 1640 - protein, 116 aa, Artificial Sequence
  CD155 v161 IgV
PGTGDVVVQAPTQVSGFLGNSVTLPCYLQVPNMEVTHVSQLTWARHGESGSMAVFHQTQGPSYSESKRLEFVAARPGAELRNASLRMSGLRVEDEGNYTCLFVMFPQGSRNVDIWL

SEQ ID NO: 1641 - protein, 116 aa, Artificial Sequence
  CD155 v162 IgV
PGTGDVVVQAPTQVSGFLGDSVTLPCYLQVSNMEVTHVSQLTWARHGVSGSMAVFHQTQGPSYSESKRLEFVAARPGAELRNASLRMSGLRVEDEGNYTCLFVTFPQRSRSVDIWL

SEQ ID NO: 1642 - protein, 116 aa, Artificial Sequence
  CD155 v163 IgV
PGTGDVVVQAPTQVSGFLGDSVTLPCYLQVPNMEVTHVSQLTWARHGESGSMAVFNQTQGPSYSESKRLEFAAARPGTELRNASLRMSGLRVEDEGNYTCMFVMFPQGSRSVDIWL

SEQ ID NO: 1643 - protein, 116 aa, Artificial Sequence
  CD155 v164 IgV
PGTGDVVVQAPTQVSGFLGDSVTLPCYLQVPNMEVTHVSQLTRARHGESGSMAVFHQTQGPSYSDSKRLEFVAARPGAELRNASLRMSGLRVEDEGNYTCLFVMFPQGSGSVDIWL

SEQ ID NO: 1644 - protein, 116 aa, Artificial Sequence
  CD155 v165 IgV
PGTGDLVVQAPTQVFGFLGDSVTLPCYLQVPNMEVTHVSQLAWARHGESGSMAVFHQTQGPAYVESKRLEFVAAKVGAELRNASLRMSGLRVEDEGNYTCLFVMFPQGSRTVDIWL

SEQ ID NO: 1645 - protein, 116 aa, Artificial Sequence
  CD155 v166 IgV
PGTGDVVVQAPTQVTGFLGDSVTLPCYLQVPNMEVTHVSQLTWARHGESGSLAVFHQRQGPSYSESKRLEFVAARPGAELRNASLRMSGLRVEDEGNYTCLFIMFPQGSRSVDIWL

SEQ ID NO: 1646 - protein, 116 aa, Artificial Sequence
  CD155 v167 IgV
PGTGDVVVQAPIQVSGFLGDSVTLPCYLQMPFMEVSHVSQLTWARHGESGSLAVFHQTQGPSYSESKRLEFVAASPGAELRNASLRMSGLRVEDEGNYTCLFVMFPQGSRSVDIWL

SEQ ID NO: 1647 - protein, 116 aa, Artificial Sequence
  CD155 v168 IgV
PGTGDVVVQAPTQVSGFLGDSVTLPCYLQVPNMEVTHVSQLTWARHGESGSMAVFHQTKGPSYSESERLEFVAARPGAELRNASLRMSELRVEDEGNYTCLFVTFPQGSWSVDIWL

SEQ ID NO: 1648 - protein, 116 aa, Artificial Sequence
  CD155 v169 IgV
PGTGDVVVQAPTQVFGILGDSVMLPCYLQVPNMEVTHVSQLTWVRHGKSGSMAVFHQTQGPSYSESKRLEFVAARPGAELRNASLRMSGLRVEDEGNYTCLFVTFPQGSRSVDIWL

SEQ ID NO: 1649 - protein, 116 aa, Artificial Sequence
  CD155 v170 IgV
PGTGDVVVQAPTQVTGFLGASVTLPCYLQVPNMEVTHVSQLTWARHGESGSMAVFHHTQGPSYSESKRLEFVAARPGAELRNASLRVSGLRVEDEGNYTCLFVMFPQGSRSVDIWL

SEQ ID NO: 1650 - protein, 116 aa, Artificial Sequence
  CD155 v171 IgV
PGTGDVVVQAPTQVSGFLGGSVTLPRYLQVPDMGVTHVSQLTWARHGESGSIAVFHQTKGPAYGESKRLEFVAAGPGAELRNASLRMSGLRVEDEGNYTCMFVMFPRGSRSVDIWL

SEQ ID NO: 1651 - protein, 116 aa, Artificial Sequence
  CD155 v172 IgV
PGTGDVVVQEPTQVSGFLGDSVTLPCYLQVPNREVTHVSQLTWARHGESGSMAVFHQTKGPSYTESKRLEFVAARPGAELRDASLRMSGLRVEDEGNYTCLFVMFPQGSRSVDIWL

SEQ ID NO: 1652 - protein, 116 aa, Artificial Sequence
  CD155 v173 IgV
PGTGDIVVQAPTQVTGFLGDSVTLPCYLQVPNMEVTHVSQLTWARRGESGSMAVFHQTQGPSYSESKRLEFVAARPGAELRDASLRMSGLRVEDEGNYTCTFVMFPQGSRSVDIWL

SEQ ID NO: 1653 - protein, 116 aa, Artificial Sequence
  CD155 v174 IgV
PGTGDAVVQAPTQVFGFLGDSVTLPCYLQVPNMEVTHVSQLTWARHGESGSMAVFHQSLGPSYSESKRLEFVAARPGAELRNASLRMSGLRVEDEGNYTCLFVTFPQRSRSVDIWL

SEQ ID NO: 1654 - protein, 116 aa, Artificial Sequence
  CD155 v175 IgV
PGTGEVVVQAPTQVTGFLGDSVTLPCYLQVPNMEVTHVSQLTWARHGESGSMAVFHQAQGPSYSESKRLEFVAARPGAELRNASLRMSGLRVEDEGNYTCLFVMFPQGSRSVDIWL

SEQ ID NO: 1655 - protein, 116 aa, Artificial Sequence
  CD155 v176 IgV
PGTGDVVVQAPTQVSGFLGDSVTLPCYLQVPNMEVTHASQLTWARRGESGCMAVFHQTQGPSYSESKRLEFVAARSGAELRYASPRMSGLRVEDEGNYTCMFVMFPQGSRSVDIWL

SEQ ID NO: 1656 - protein, 116 aa, Artificial Sequence
  CD155 v177 IgV
PGTGDVVEQAPTQVHGYLGDSETLPCYLQVPSMEVTHVSQLTWARRGESGSMAVFHQTQGPSYSESKRLEFVAARPGAELRNASLRMSGLRVEDEGNYTCLFVMFPQRSRSVDIWL

SEQ ID NO: 1657 - protein, 116 aa, Artificial Sequence
  CD155 v178 IgV
PGTGDVVAQAPTQVFGFLGASVTLPCYLQVPNMEVTHVSQLTWARHGESGSMAVFHQTQGPSYSESKRLEFVAARPDAELRNASLRMFGLRAEDEGNYTCLFVMFPQGSRSVDIWL

SEQ ID NO: 1658 - protein, 116 aa, Artificial Sequence
  CD155 v179 IgV
PGTGDVVVQAPTQVSGFLGDSVTLPCYLQVPNMEVTHVSQLTWARHGESGSMAVFHQTQGPSYSESRRLEFVAARPGAELRNASLRMSGLRVEDEGNYTCLFVTFPQRSRSVDIWL

SEQ ID NO: 1659 - protein, 116 aa, Artificial Sequence
  CD155 v180 IgV
PGTGDLVMQAPTQVSGFLGDSVTLPCYLQVPSMEVTHVSQLTWARHGESGGMAVFHQTKGPSYSESKRLEFVAARPGAELRNASLRMFGLRVEDEGNYTCMFVMFPQGSRSMDIWL

SEQ ID NO: 1660 - protein, 116 aa, Artificial Sequence
  CD155 v181 IgV
PGTGDLVVQAPTQVYGFLGDSATLPCYLQVPNMEGTHVSQLTWARHGESGSVAVFHQTQGPSYSESKRLEFVATRPGAELRNASLRISGLRVEDEGNYTCMFVTFPQGSRSVDIWL

SEQ ID NO: 1661 - protein, 116 aa, Artificial Sequence
  CD155 v182 IgV
PGTGDVGVQAPTQVTGFLGDSVTLPCYLQVPNMEVTHVSQLTWARHGESGSMAVFHQTQGPSYSESKRQEFVAARPGAELRNASLRMSGLRVEDEGNYTCLFVMFPQGSRSVDIWL

SEQ ID NO: 1662 - protein, 116 aa, Artificial Sequence
  CD155 v183 IgV
PGTGDVVVQAPTQVSGFLGDSVTLPCYLQVPNMEVTHVSQLTWARHGESGSMAVFRQTQGPSYSESKRLEFVGASPGAELRNASLRMFGLRVEDEGNYTCLFVTFPQGSRSVDIWL

SEQ ID NO: 1663 - protein, 116 aa, Artificial Sequence
  CD155 v184 IgV
PGTGDAVVQAPTQVSGFLGDSVTLPCYLQVPNTEVTHVSQLTWARHGESGSMAVFHQTQGPGYSESKRLEFVAARPGAELRNASLRMSGLRVEDEGNYTCTFVTFPQRIRSVDIWL

SEQ ID NO: 1664 - protein, 116 aa, Artificial Sequence
  CD155 v185 IgV
PGTGDVVVQAPTQVTGFLGDSVTLPCYLQVPNMEVTHVSQLTWARHGEAGSMAAFHRTKGPCYSESKRLEFVAARPGAELRNASLRMTGLRVEDEGYYTCLFVMFPQGSRSVDIWL

SEQ ID NO: 1665 - protein, 116 aa, Artificial Sequence
  CD155 v186 IgV
PGTGDVVAQAPTQVFGFLGDSVTLPCYLQVPDMEVTHVSQLTWERHGESGSMAVFHQTKGPSYSESKRLEFVAARPGAELRNASLRMSGLRVEDEDNYTCLFVMFPQGSRNVDIWL

SEQ ID NO: 1666 - protein, 116 aa, Artificial Sequence
  CD155 v187 IgV
PGTGDVVAQAPTQVTGFLGDSVTLPCYLQVPSMEVTHVSQLTWARHGESGSMAVFHQTQGPSYSESKRLEFVAARPGAELRNATLRMSGLRVEDEGNYTCLFVTFPQGSRSVDIWL

SEQ ID NO: 1667 - protein, 116 aa, Artificial Sequence
  CD155 v188 IgV
PGTGDDVMLAPTQVSGFLGDSVTLPCYLQVPNMVVTHVSQLTWARHGESGSIAVFHRTQGPSYSESQRLEFVAARPGAELRNASLRMSGLRVEDEGNYTCMFVMFPQGSRSVDIWL

SEQ ID NO: 1668 - protein, 116 aa, Artificial Sequence
  CD155 v189 IgV
PGTGDVVVQAPSQVSGFLGDSVTLPCHLLVPNMEVTHVSQLTWARHGESGSMAVFHQTRGPSYSESKRLEFVAARPGAELRNASLRMSGLRVEDEGNYTCLFVMFPQGSRSVDIWL

SEQ ID NO: 1669 - protein, 122 aa, Artificial Sequence
  CD155 v144 IgV
WPPPGTGDVVVQAPTQVTDFLGDSVTLPCYLQVPNTEVTHVSQLTWARHGESGNMAVFHQTQGPSYSESKRLEFVAARPGAEQRNASLRMSGLRVEDEGNYTCLFVMYPQGSRSVDIWLRVL

SEQ ID NO: 1670 - protein, 122 aa, Artificial Sequence
  CD155 v145 IgV
WPPPGTGDLVVQAPTQVLGFLGDSVTLPCYLQVPNMEVTHVSQLTWARHGESGSVAVFHQTQGPSYSELKRLEFVAARPGEELRNASLRMSGLRVEDEGNYTCLFVMFPQGSRSVDIWLRVL

SEQ ID NO: 1671 - protein, 122 aa, Artificial Sequence
  CD155 v146 IgV
WPPPGTGDVVVQAPTQVFGFLGDSVTLPCYLQVPNMEVTQVSQLTWARHGESGSMAVFHQKKGPSYSESKRLEFVAARPGAELRNASLRMSGLRVEDEGNYTCMFVVFPQGSRSVDIWLRVL

SEQ ID NO: 1672 - protein, 122 aa, Artificial Sequence
  CD155 v147 IgV
WPPPGTGDVVVQAPTQVSGFLGDSVTLPCYLRVPNMEVTHVSQLTWARHGESGSMAVFHQTKGPSYSESKRLEFVAAGPGAELRNASLRMSGLRVEDEGNYTCLFVAFPQGSWSVDIWLRVL

SEQ ID NO: 1673 - protein, 122 aa, Artificial Sequence
  CD155 v148 IgV
WPPPGTGDVVVHAPTQVTGFSSDSVTLPCYLQVPNMEVTHVSQLTWARHGESGSMAAFHQTRGPSYSESKRLEFVAARPGAELRNASLRMSGLRVEDEGNYTCLFVMFPQGSRSVDIWLRVL

SEQ ID NO: 1674 - protein, 122 aa, Artificial Sequence
  CD155 v149 IgV
WPPPGTGDIVVQAPTQVSGFLGDPVTLPCYLQVPNMEVTHVSQLTWARQGESGSMAVYHRTKGPSYSESKRLEFVAARPGAELRNASLRMSGLRVEDEGNYTCLFVMFPQGSRSVDIWLRVL

SEQ ID NO: 1675 - protein, 122 aa, Artificial Sequence
  CD155 v150 IgV
WPPPGTGDVVVQAPTQVTGFLGDSVTLPCYLQVPNMEVTHVSQLTCARRGESGSMAVFHQTQGPAYVESKRLEFVTARPGAELRNATLRMFGLRVEDEGNYTCMFVTFPQGSRSVDIWLRVL

SEQ ID NO: 1676 - protein, 122 aa, Artificial Sequence
  CD155 v151 IgV
WPPPGTGDVVVQAPTQVSGFLGDSVTLPCYLQVPNMEVTHVTQLTWARHGGSGSMAVFHQTQGPSYSESKRLEFVAARPGAELRNASLRMSWLRVEDEGNYTCLFVMFPQGSRSVDIWLRVL

SEQ ID NO: 1677 - protein, 122 aa, Artificial Sequence
  CD155 v152 IgV
WPPPGTGDVFVQAPSQVLGFLGDSVTLPCYLQVPNMEVTHVSQLTWAQHGESGSMAVFHQTQGPSYSESKRLEFVAARPGAELRNASLRMSGLRVEDEGNYTCLFVMFPQGSRSMDIWLRVL

SEQ ID NO: 1678 - protein, 122 aa, Artificial Sequence
  CD155 v153 IgV
WPPPGTGDVVVQAPTQVSGFMGDSVTLPCFLQVPDMEVTHVSQLTWARHGESGSMAVFHQTQGPSYSESKRLEFVAARLGAELWNASLRMSGLRVEDEGNYTCLFVMFPQGSRSVGIWLRVL

SEQ ID NO: 1679 - protein, 122 aa, Artificial Sequence
  CD155 v154 IgV
WPPPGTGDVVVQAPTQVFGFLGDSVTLPCYLQVPNMEVTHVSQLTWARHGVSGGMAVFHRTQGPSYSESKRLEFVAARQGAGLRNATLRISRLRVEDEGNYTCLFVMFPQGSRSVDIWLRVL

SEQ ID NO: 1680 - protein, 122 aa, Artificial Sequence
  CD155 v155 IgV
WPPPGTGDVVVQAPTHVFGFLGDSVTLPCYLQVPNMEVTHVSQLTWARHGESGSMAVFHQTQGPSYSESKRLEFVAARLGAELRNASLRMSGLRVEDEGNYTCLFVMFPQGSRSVDIWLRVL

SEQ ID NO: 1681 - protein, 122 aa, Artificial Sequence
  CD155 v156 IgV
WPPPGTGDVVVQAPTQVTGFLGGSVTLPCYLQVPNMEVTHVSQLTWARHGESGSMAVFHRTQGPSYLESKRLEFVAARPGAELRNASLRMSGLRVEDEGNYTCLFVMFPQGSRSADIWLRVL

SEQ ID NO: 1682 - protein, 122 aa, Artificial Sequence
  CD155 v157 IgV
WPPPGTGGIVAQAPTQVTGFLGDSVMLPCYLQVPNMEVTHVSQLTWARHGEPGSMAVFHQTQGPSYSESKRLEFVAARPGAELRNASLRMSALRVEDEGNYTCLFVLFPQGSRSADIWLRVL

SEQ ID NO: 1683 - protein, 122 aa, Artificial Sequence
  CD155 v158 IgV
WPPPGTGDIVVQAPTQVFGFLGDSVTLPCYLQVPNMEVTHVSQLTWERHSESGSMAVFHQTQGPSYSGSKRLEFVAARPGAELRNASLRMSGLRVEDEGNYTCLFVMFPQGSRSVDIWLRVL

SEQ ID NO: 1684 - protein, 122 aa, Artificial Sequence
  CD155 v159 IgV
WPPPGTGDVVVQAPTQVSGFLGDSVTLPCYLQVPNMEVTHVSQLTWARHGESGSIAVFHQTKGPSYSEPKRLEFVAARPGAELRNASLRMSGLRVEDEGNYTCLFVMFPQGSRSVDIWLRVL

SEQ ID NO: 1685 - protein, 122 aa, Artificial Sequence
  CD155 v160 IgV
WPPPGTGDVVVQAPTQVTGFLGDSVTLPCYLQVPNMEVSHVSQLTWARHGEPGRMAVFHQTQGPSYSESKRLEFVAARPGAELRNASLRMSGLRVEDEGNYTCLFVMFPQGSRSVDIWLRVL

SEQ ID NO: 1686 - protein, 122 aa, Artificial Sequence
  CD155 v161 IgV
WPPPGTGDVVVQAPTQVSGFLGNSVTLPCYLQVPNMEVTHVSQLTWARHGESGSMAVFHQTQGPSYSESKRLEFVAARPGAELRNASLRMSGLRVEDEGNYTCLFVMFPQGSRNVDIWLRVL

SEQ ID NO: 1687 - protein, 122 aa, Artificial Sequence
  CD155 v162 IgV
WPPPGTGDVVVQAPTQVSGFLGDSVTLPCYLQVSNMEVTHVSQLTWARHGVSGSMAVFHQTQGPSYSESKRLEFVAARPGAELRNASLRMSGLRVEDEGNYTCLFVTFPQRSRSVDIWLRVL

SEQ ID NO: 1688 - protein, 122 aa, Artificial Sequence
  CD155 v163 IgV
WPPPGTGDVVVQAPTQVSGFLGDSVTLPCYLQVPNMEVTHVSQLTWARHGESGSMAVFNQTQGPSYSESKRLEFAAARPGTELRNASLRMSGLRVEDEGNYTCMFVMFPQGSRSVDIWLRVL

SEQ ID NO: 1689 - protein, 122 aa, Artificial Sequence
  CD155 v164 IgV
WPPPGTGDVVVQAPTQVSGFLGDSVTLPCYLQVPNMEVTHVSQLTRARHGESGSMAVFHQTQGPSYSDSKRLEFVAARPGAELRNASLRMSGLRVEDEGNYTCLFVMFPQGSGSVDIWLRVL

SEQ ID NO: 1690 - protein, 122 aa, Artificial Sequence
  CD155 v165 IgV
WPPPGTGDLVVQAPTQVFGFLGDSVTLPCYLQVPNMEVTHVSQLAWARHGESGSMAVFHQTQGPAYVESKRLEFVAAKVGAELRNASLRMSGLRVEDEGNYTCLFVMFPQGSRTVDIWLRVL

SEQ ID NO: 1691 - protein, 122 aa, Artificial Sequence
  CD155 v166 IgV
WPPPGTGDVVVQAPTQVTGFLGDSVTLPCYLQVPNMEVTHVSQLTWARHGESGSLAVFHQRQGPSYSESKRLEFVAARPGAELRNASLRMSGLRVEDEGNYTCLFIMFPQGSRSVDIWLRVL

SEQ ID NO: 1692 - protein, 122 aa, Artificial Sequence
  CD155 v167 IgV
WPPPGTGDVVVQAPIQVSGFLGDSVTLPCYLQMPFMEVSHVSQLTWARHGESGSLAVFHQTQGPSYSESKRLEFVAASPGAELRNASLRMSGLRVEDEGNYTCLFVMFPQGSRSVDIWLRVL

SEQ ID NO: 1693 - protein, 122 aa, Artificial Sequence
  CD155 v168 IgV
WPPPGTGDVVVQAPTQVSGFLGDSVTLPCYLQVPNMEVTHVSQLTWARHGESGSMAVFHQTKGPSYSESERLEFVAARPGAELRNASLRMSELRVEDEGNYTCLFVTFPQGSWSVDIWLRVL

SEQ ID NO: 1694 - protein, 122 aa, Artificial Sequence
  CD155 v169 IgV
WPPPGTGDVVVQAPTQVFGILGDSVMLPCYLQVPNMEVTHVSQLTWVRHGKSGSMAVFHQTQGPSYSESKRLEFVAARPGAELRNASLRMSGLRVEDEGNYTCLFVTFPQGSRSVDIWLRVL

SEQ ID NO: 1695 - protein, 122 aa, Artificial Sequence
  CD155 v170 IgV
WPPPGTGDVVVQAPTQVTGFLGASVTLPCYLQVPNMEVTHVSQLTWARHGESGSMAVFHHTQGPSYSESKRLEFVAARPGAELRNASLRVSGLRVEDEGNYTCLFVMFPQGSRSVDIWLRVL

SEQ ID NO: 1696 - protein, 122 aa, Artificial Sequence
  CD155 v171 IgV
WPPPGTGDVVVQAPTQVSGFLGGSVTLPRYLQVPDMGVTHVSQLTWARHGESGSIAVFHQTKGPAYGESKRLEFVAAGPGAELRNASLRMSGLRVEDEGNYTCMFVMFPRGSRSVDIWLRVL

SEQ ID NO: 1697 - protein, 122 aa, Artificial Sequence
  CD155 v172 IgV
WPPPGTGDVVVQEPTQVSGFLGDSVTLPCYLQVPNREVTHVSQLTWARHGESGSMAVFHQTKGPSYTESKRLEFVAARPGAELRDASLRMSGLRVEDEGNYTCLFVMFPQGSRSVDIWLRVL

SEQ ID NO: 1698 - protein, 122 aa, Artificial Sequence
  CD155 v173 IgV
WPPPGTGDIVVQAPTQVTGFLGDSVTLPCYLQVPNMEVTHVSQLTWARRGESGSMAVFHQTQGPSYSESKRLEFVAARPGAELRDASLRMSGLRVEDEGNYTCTFVMFPQGSRSVDIWLRVL

SEQ ID NO: 1699 - protein, 122 aa, Artificial Sequence
  CD155 v174 IgV
WPPPGTGDAVVQAPTQVFGFLGDSVTLPCYLQVPNMEVTHVSQLTWARHGESGSMAVFHQSLGPSYSESKRLEFVAARPGAELRNASLRMSGLRVEDEGNYTCLFVTFPQRSRSVDIWLRVL

SEQ ID NO: 1700 - protein, 122 aa, Artificial Sequence
  CD155 v175 IgV
WPPPGTGEVVVQAPTQVTGFLGDSVTLPCYLQVPNMEVTHVSQLTWARHGESGSMAVFHQAQGPSYSESKRLEFVAARPGAELRNASLRMSGLRVEDEGNYTCLFVMFPQGSRSVDIWLRVL

SEQ ID NO: 1701 - protein, 122 aa, Artificial Sequence
  CD155 v176 IgV
WPPPGTGDVVVQAPTQVSGFLGDSVTLPCYLQVPNMEVTHASQLTWARRGESGCMAVFHQTQGPSYSESKRLEFVAARSGAELRYASPRMSGLRVEDEGNYTCMFVMFPQGSRSVDIWLRVL

SEQ ID NO: 1702 - protein, 122 aa, Artificial Sequence
  CD155 v177 IgV
WPPPGTGDVVEQAPTQVHGYLGDSETLPCYLQVPSMEVTHVSQLTWARRGESGSMAVFHQTQGPSYSESKRLEFVAARPGAELRNASLRMSGLRVEDEGNYTCLFVMFPQRSRSVDIWLRVL

SEQ ID NO: 1703 - protein, 122 aa, Artificial Sequence
  CD155 v178 IgV
WPPPGTGDVVAQAPTQVFGFLGASVTLPCYLQVPNMEVTHVSQLTWARHGESGSMAVFHQTQGPSYSESKRLEFVAARPDAELRNASLRMFGLRAEDEGNYTCLFVMFPQGSRSVDIWLRVL

SEQ ID NO: 1704 - protein, 122 aa, Artificial Sequence
  CD155 v179 IgV
WPPPGTGDVVVQAPTQVSGFLGDSVTLPCYLQVPNMEVTHVSQLTWARHGESGSMAVFHQTQGPSYSESRRLEFVAARPGAELRNASLRMSGLRVEDEGNYTCLFVTFPQRSRSVDIWLRVL

SEQ ID NO: 1705 - protein, 122 aa, Artificial Sequence
  CD155 v180 IgV
WPPPGTGDLVMQAPTQVSGFLGDSVTLPCYLQVPSMEVTHVSQLTWARHGESGGMAVFHQTKGPSYSESKRLEFVAARPGAELRNASLRMFGLRVEDEGNYTCMFVMFPQGSRSMDIWLRVL

SEQ ID NO: 1706 - protein, 122 aa, Artificial Sequence
  CD155 v181 IgV
WPPPGTGDLVVQAPTQVYGFLGDSATLPCYLQVPNMEGTHVSQLTWARHGESGSVAVFHQTQGPSYSESKRLEFVATRPGAELRNASLRISGLRVEDEGNYTCMFVTFPQGSRSVDIWLRVL

SEQ ID NO: 1707 - protein, 122 aa, Artificial Sequence
  CD155 v182 IgV
WPPPGTGDVGVQAPTQVTGFLGDSVTLPCYLQVPNMEVTHVSQLTWARHGESGSMAVFHQTQGPSYSESKRQEFVAARPGAELRNASLRMSGLRVEDEGNYTCLFVMFPQGSRSVDIWLRVL

SEQ ID NO: 1708 - protein, 122 aa, Artificial Sequence
  CD155 v183 IgV
WPPPGTGDVVVQAPTQVSGFLGDSVTLPCYLQVPNMEVTHVSQLTWARHGESGSMAVFRQTQGPSYSESKRLEFVGASPGAELRNASLRMFGLRVEDEGNYTCLFVTFPQGSRSVDIWLRVL

SEQ ID NO: 1709 - protein, 122 aa, Artificial Sequence
  CD155 v184 IgV
WPPPGTGDAVVQAPTQVSGFLGDSVTLPCYLQVPNTEVTHVSQLTWARHGESGSMAVFHQTQGPGYSESKRLEFVAARPGAELRNASLRMSGLRVEDEGNYTCTFVTFPQRIRSVDIWLRVL

SEQ ID NO: 1710 - protein, 122 aa, Artificial Sequence
  CD155 v185 IgV
WPPPGTGDVVVQAPTQVTGFLGDSVTLPCYLQVPNMEVTHVSQLTWARHGEAGSMAAFHRTKGPCYSESKRLEFVAARPGAELRNASLRMTGLRVEDEGYYTCLFVMFPQGSRSVDIWLRVL

SEQ ID NO: 1711 - protein, 122 aa, Artificial Sequence
  CD155 v186 IgV
WPPPGTGDVVAQAPTQVFGFLGDSVTLPCYLQVPDMEVTHVSQLTWERHGESGSMAVFHQTKGPSYSESKRLEFVAARPGAELRNASLRMSGLRVEDEDNYTCLFVMFPQGSRNVDIWLRVL

SEQ ID NO: 1712 - protein, 122 aa, Artificial Sequence
  CD155 v187 IgV
WPPPGTGDVVAQAPTQVTGFLGDSVTLPCYLQVPSMEVTHVSQLTWARHGESGSMAVFHQTQGPSYSESKRLEFVAARPGAELRNATLRMSGLRVEDEGNYTCLFVTFPQGSRSVDIWLRVL

SEQ ID NO: 1713 - protein, 122 aa, Artificial Sequence
  CD155 v188 IgV
WPPPGTGDDVMLAPTQVSGFLGDSVTLPCYLQVPNMVVTHVSQLTWARHGESGSIAVFHRTQGPSYSESQRLEFVAARPGAELRNASLRMSGLRVEDEGNYTCMFVMFPQGSRSVDIWLRVL

SEQ ID NO: 1714 - protein, 122 aa, Artificial Sequence
  CD155 v189 IgV
WPPPGTGDVVVQAPSQVSGFLGDSVTLPCHLLVPNMEVTHVSQLTWARHGESGSMAVFHQTRGPSYSESKRLEFVAARPGAELRNASLRMSGLRVEDEGNYTCLFVMFPQGSRSVDIWLRVL

SEQ ID NO: 1715 - protein, 231 aa, Artificial Sequence
  Stack Fc Lysine removed (homodimeric)
EPKSSDKTHTCPPCPAPEAEGAPSVFLFPPKPKDTLMISRTPEVTCVVVDVSHEDPEVKFNWYVDGVEVHNAKTKPREEQYNSTYRVVSVLTVLHQDWLNGKEYKCKVSNKALPAPIEKTISKAKGQPREPQVYTLPPSRDELTKNQVSLTCLVKGFYPSDIAVEWESNGQPENNYKTTPPVLDSDGSFFLYSKLTVDKSRWQQGNVFSCSVMHEALHNHYTQKSLSLSPG

SEQ ID NO: 1716 - protein, 494 aa, Artificial Sequence
  PD-L1/CD155 Stack 1 Fc fusion
WPPPGTGDVVVQAPTQVSGFLGDSVTLPCYLQVPNMEVTHVSQLTWARHGESGSMAVFHQTQGPWYAESKRLEFVAARLGAELRNASLRMFGLRVEDEGNYTCQFVTFPQRSRSVDIWLRVLGGGGSGGGGSEPKSSDKTHTCPPCPAPEAEGAPSVFLFPPKPKDTLMISRTPEVTCVVVDVSHEDPEVKFNWYVDGVEVHNAKTKPREEQYNSTYRVVSVLTVLHQDWLNGKEYKCKVSNKALPAPIEKTISKAKGQPREPQVYTLPPSRDELTKNQVSLTCLVKGFYPSDIAVEWESNGQPENNYKTTPPVLDSDGSFFLYSKLTVDKSRWQQGNVFSCSVMHEALHNHYTQKSLSLSPGKGGGGSGGGGSGGGGSFTVTVPKDLYVVEYGSNMTIECKFPVEKQLDLAALIVYWEMEGKDIIQFVHGEEDQKAQHSSYRQRARLLKDQLSLGNAALQITDVKLQDAGVYRCMISYGGGADYKRITVKVNA

SEQ ID NO: 1717 - protein, 494 aa, Artificial Sequence
  PD-L1/CD155 Stack 2 Fc fusion
FTVTVPKDLYVVEYGSNMTIECKFPVEKQLDLAALIVYWEMEGKDIIQFVHGEEDQKAQHSSYRQRARLLKDQLSLGNAALQITDVKLQDAGVYRCMISYGGGADYKRITVKVNAGGGGSGGGGSEPKSSDKTHTCPPCPAPEAEGAPSVFLFPPKPKDTLMISRTPEVTCVVVDVSHEDPEVKFNWYVDGVEVHNAKTKPREEQYNSTYRVVSVLTVLHQDWLNGKEYKCKVSNKALPAPIEKTISKAKGQPREPQVYTLPPSRDELTKNQVSLTCLVKGFYPSDIAVEWESNGQPENNYKTTPPVLDSDGSFFLYSKLTVDKSRWQQGNVFSCSVMHEALHNHYTQKSLSLSPGKGGGGSGGGGSGGGGSWPPPGTGDVVVQAPTQVSGFLGDSVTLPCYLQVPNMEVTHVSQLTWARHGESGSMAVFHQTQGPWYAESKRLEFVAARLGAELRNASLRMFGLRVEDEGNYTCQFVTFPQRSRSVDIWLRVL

SEQ ID NO: 1718 - protein, 494 aa, Artificial Sequence
  PD-L1/CD155 Stack 3 Fc fusion
WPPPGTGDVVVQAPTQVSGFLGDSVTLPCYLQVPNMEVTHVSQLTWARHGESGSMAVFHQTQGPWYAESKRLEFVAARLGAELRNASLRMFGLRVEDEGNYTCQFVTFPQRSRSVDIWLRVLGGGGSGGGGSGGGGSFTVTVPKDLYVVEYGSNMTIECKFPVEKQLDLAALIVYWEMEGKDIIQFVHGEEDQKAQHSSYRQRARLLKDQLSLGNAALQITDVKLQDAGVYRCMISYGGGADYKRITVKVNAGGGGSGGGGSEPKSSDKTHTCPPCPAPEAEGAPSVFLFPPKPKDTLMISRTPEVTCVVVDVSHEDPEVKFNWYVDGVEVHNAKTKPREEQYNSTYRVVSVLTVLHQDWLNGKEYKCKVSNKALPAPIEKTISKAKGQPREPQVYTLPPSRDELTKNQVSLTCLVKGFYPSDIAVEWESNGQPENNYKTTPPVLDSDGSFFLYSKLTVDKSRWQQGNVFSCSVMHEALHNHYTQKSLSLSPGK

SEQ ID NO: 1719 - protein, 494 aa, Artificial Sequence
  PD-L1/CD155 Stack 4 Fc fusion
FTVTVPKDLYVVEYGSNMTIECKFPVEKQLDLAALIVYWEMEGKDIIQFVHGEEDQKAQHSSYRQRARLLKDQLSLGNAALQITDVKLQDAGVYRCMISYGGGADYKRITVKVNAGGGGSGGGGSGGGGSWPPPGTGDVVVQAPTQVSGFLGDSVTLPCYLQVPNMEVTHVSQLTWARHGESGSMAVFHQTQGPWYAESKRLEFVAARLGAELRNASLRMFGLRVEDEGNYTCQFVTFPQRSRSVDIWLRVLGGGGSGGGGSEPKSSDKTHTCPPCPAPEAEGAPSVFLFPPKPKDTLMISRTPEVTCVVVDVSHEDPEVKFNWYVDGVEVHNAKTKPREEQYNSTYRVVSVLTVLHQDWLNGKEYKCKVSNKALPAPIEKTISKAKGQPREPQVYTLPPSRDELTKNQVSLTCLVKGFYPSDIAVEWESNGQPENNYKTTPPVLDSDGSFFLYSKLTVDKSRWQQGNVFSCSVMHEALHNHYTQKSLSLSPGK

SEQ ID NO: 1720 - protein, 507 aa, Artificial Sequence
  PD-L1/CD155 Stack 5 Fc fusion
HMSSVSAQEPKSSDKTHTCPPCPAPEAEGAPSVFLFPPKPKDTLMISRTPEVTCVVVDVSHEDPEVKFNWYVDGVEVHNAKTKPREEQYNSTYRVVSVLTVLHQDWLNGKEYKCKVSNKALPAPIEKTISKAKGQPREPQVYTLPPSRDELTKNQVSLTCLVKGFYPSDIAVEWESNGQPENNYKTTPPVLDSDGSFFLYSKLTVDKSRWQQGNVFSCSVMHEALHNHYTQKSLSLSPGKGGGGSGGGGSGGGGSWPPPGTGDVVVQAPTQVSGFLGDSVTLPCYLQVPNMEVTHVSQLTWARHGESGSMAVFHQTQGPWYAESKRLEFVAARLGAELRNASLRMFGLRVEDEGNYTCQFVTFPQRSRSVDIWLRVLGGGGSGGGGSGGGGSFTVTVPKDLYVVEYGSNMTIECKFPVEKQLDLAALIVYWEMEGKDIIQFVHGEEDQKAQHSSYRQRARLLKDQLSLGNAALQITDVKLQDAGVYRCMISYGGGADYKRITVKVNA

SEQ ID NO: 1721 - protein, 507 aa, Artificial Sequence
  PD-L1/CD155 Stack 6 Fc fusion
HMSSVSAQEPKSSDKTHTCPPCPAPEAEGAPSVFLFPPKPKDTLMISRTPEVTCVVVDVSHEDPEVKFNWYVDGVEVHNAKTKPREEQYNSTYRVVSVLTVLHQDWLNGKEYKCKVSNKALPAPIEKTISKAKGQPREPQVYTLPPSRDELTKNQVSLTCLVKGFYPSDIAVEWESNGQPENNYKTTPPVLDSDGSFFLYSKLTVDKSRWQQGNVFSCSVMHEALHNHYTQKSLSLSPGKGGGGSGGGGSGGGGSFTVTVPKDLYVVEYGSNMTIECKFPVEKQLDLAALIVYWEMEGKDIIQFVHGEEDQKAQHSSYRQRARLLKDQLSLGNAALQITDVKLQDAGVYRCMISYGGGADYKRITVKVNAGGGGSGGGGSGGGGSWPPPGTGDVVVQAPTQVSGFLGDSVTLPCYLQVPNMEVTHVSQLTWARHGESGSMAVFHQTQGPWYAESKRLEFVAARLGAELRNASLRMFGLRVEDEGNYTCQFVTFPQRSRSVDIWLRVL

SEQ ID NO: 1722 - protein, 635 aa, Artificial Sequence
  PD-L1/CD112/CD155 Stack 1 Fc fusion
FTVTVPKDLYVVEYGSNMTIECKFPVEKQLDLAALIVYWEMEGKDIIQFVHGEEDQKAQHSSYRQRARLLKDQLSLGNAALQITDVKLQDAGVYRCMISYGGGADYKRITVKVNAGGGGSGGGGSGGGGSWPPPGTGDVVVQAPTQVSGFLGDSVTLPCYLQVPNMEVTHVSQLTWARHGESGSMAVFHQTQGPWYAESKRLEFVAARLGAELRNASLRMFGLRVEDEGNYTCQFVTFPQRSRSVDIWLRVLGGGGSGGGGSEPKSSDKTHTCPPCPAPEAEGAPSVFLFPPKPKDTLMISRTPEVTCVVVDVSHEDPEVKFNWYVDGVEVHNAKTKPREEQYNSTYRVVSVLTVLHQDWLNGKEYKCKVSNKALPAPIEKTISKAKGQPREPQVYTLPPSRDELTKNQVSLTCLVKGFYPSDIAVEWESNGQPENNYKTTPPVLDSDGSFFLYSKLTVDKSRWQQGNVFSCSVMHEALHNHYTQKSLSLSPGGGGGSGGGGSGGGGSQDVRVQVLPEVRGQLGGTVELPCHLLPPVPGLYISLVTWQRPDAPANHQNVAAFHPKMGPSFPSPKPGSERLSFVSAKQSTGQDTEAELQDATLALHGLTVEDEGNYTCEFATFPKGFVRGMTWLRV

SEQ ID NO: 1723 - protein, 635 aa, Artificial Sequence
  PD-L1/CD112/CD155 Stack 2 Fc fusion
FTVTVPKDLYVVEYGSNMTIECKFPVEKQLDLAALIVYWEMEGKDIIQFVHGEEDQKAQHSSYRQRARLLKDQLSLGNAALQITDVKLQDAGVYRCMISYGGGADYKRITVKVNAGGGGSGGGGSGGGGSWPPPGTGDVVVQAPTQVSGFLGDSVTLPCYLQVPNMEVTHVSQLTWARHGESGSMAVFHQTQGPWYAESKRLEFVAARLGAELRNASLRMFGLRVEDEGNYTCQFVTFPQRSRSVDIWLRVLGGGGSGGGGSGGGSQDVRVQVLPEVRGQLGGTVELPCHLLPPVPGLYISLVTWQRPDAPANHQNVAAFHPKMGPSFPSPKPGSERLSFVSAKQSTGQDTEAELQDATLALHGLTVEDEGNYTCEFATFPKGFVRGMTWLRVGGGGSGGGGSEPKSSDKTHTCPPCPAPEAEGAPSVFLFPPKPKDTLMISRTPEVTCVVVDVSHEDPEVKFNWYVDGVEVHNAKTKPREEQYNSTYRVVSVLTVLHQDWLNGKEYKCKVSNKALPAPIEKTISKAKGQPREPQVYTLPPSRDELTKNQVSLTCLVKGFYPSDIAVEWESNGQPENNYKTTPPVLDSDGSFFLYSKLTVDKSRWQQGNVFSCSVMHEALHNHYTQKSLSLSPGK

SEQ ID NO: 1724 - protein, 636 aa, Artificial Sequence
  PD-L1/CD112/CD155 Stack 3 Fc fusion
FTVTVPKDLYVVEYGSNMTIECKFPVEKQLDLAALIVYWEMEGKDIIQFVHGEEDQKAQHSSYRQRARLLKDQLSLGNAALQITDVKLQDAGVYRCMISYGGGADYKRITVKVNAGGGGSGGGGSGGGGSQDVRVQVLPEVRGQLGGTVELPCHLLPPVPGLYISLVTWQRPDAPANHQNVAAFHPKMGPSFPSPKPGSERLSFVSAKQSTGQDTEAELQDATLALHGLTVEDEGNYTCEFATFPKGFVRGMTWLRVGGGGSGGGGSGGGGSWPPPGTGDVVVQAPTQVSGFLGDSVTLPCYLQVPNMEVTHVSQLTWARHGESGSMAVFHQTQGPWYAESKRLEFVAARLGAELRNASLRMFGLRVEDEGNYTCQFVTFPQRSRSVDIWLRVLGGGGSGGGGSEPKSSDKTHTCPPCPAPEAEGAPSVFLFPPKPKDTLMISRTPEVTCVVVDVSHEDPEVKFNWYVDGVEVHNAKTKPREEQYNSTYRVVSVLTVLHQDWLNGKEYKCKVSNKALPAPIEKTISKAKGQPREPQVYTLPPSRDELTKNQVSLTCLVKGFYPSDIAVEWESNGQPENNYKTTPPVLDSDGSFFLYSKLTVDKSRWQQGNVFSCSVMHEALHNHYTQKSLSLSPGK

SEQ ID NO: 1725 - protein, 221 aa, Artificial Sequence
  PD-L1 ECD v66
FTVTVPKDLYVVEYGSNMTLECKFPVEEQLDLAALIVYWEMEGKDIIQFVHGEEDLKAQHSSYRQRARLLKDQLSLGNAALQITDVKLRDAGVYRCMISYGGGADYKRITVKVNAPYNKINQRILVVDPVTSEHELTCQAEGYPKAEVIWTSSDHQVLSGKTTTTNSKREEKLFNVTSTLRINTTTNEIFYCTFRRLDPEENHTAELVIPELPLAHPPNER

SEQ ID NO: 1726 - protein, 108 aa, Artificial Sequence
  PD-L1 IgV 66
PKDLYVVEYGSNMTLECKFPVEEQLDLAALIVYWEMEGKDIIQFVHGEEDLKAQHSSYRQRARLLKDQLSLGNAALQITDVKLRDAGVYRCMISYGGGADYKRITVKV

SEQ ID NO: 1727 - protein, 115 aa, Artificial Sequence
  PD-L1 IgV v66
FTVTVPKDLYVVEYGSNMTLECKFPVEEQLDLAALIVYWEMEGKDIIQFVHGEEDLKAQHSSYRQRARLLKDQLSLGNAALQITDVKLRDAGVYRCMISYGGGADYKRITVKVNA

SEQ ID NO: 1728 - protein, 221 aa, Homo sapiens [sequence omitted]

SEQ ID NO: 1729 - protein, 221 aa, Artificial Sequence
  PD-L1 ECD v67
FTVTVPKDLYVVEYGSNMTIECKFPVEKQLDLAALIVYWEMEDKNIIQFVHGEEDLRVQHSSYRQRARLLKDQLSLGNAALQITDVKLQDAGVYRCMIGYGGADYKRITVKVNAPYNKINQRILVVDPVTSEHELTCQAEGYPKAEVIWTSSDHQVLSGKTTTTNSKREEKLFNVTSTLRINTTTNEIFYCTFRRLDPEENHTAELVIPELPLAHPPNERT

SEQ ID NO: 1730 - protein, 221 aa, Artificial Sequence
  PD-L1 ECD v68
FTVTVPKDLYVVEYGSNMTIECKFPVEKQLDLAALIVYWEMEDKNIIQFVHGEEDLRVQHSSYRQRARLLKDQLSLGNAALQITDVKLQDAGVYRCMIGYGGADYKRITVKVNAPYNKINQRILVVDPVTSEHELTCQAEGYPKAEVIWTSSDHQVLSGKTTTTNSKREEKLFNVTSTLRINTTTNEILYCTFRRLDPEENHTAELVIPELPLAHPPNERT

SEQ ID NO: 1731 - protein, 221 aa, Artificial Sequence
  PD-L1 ECD v69
FTVTVPKDLYVVEYGSNVTIECKFPVEKQLDLAALIVYWEMEDKNIIQFVHGEEDLKVQHSSYRQRARLLKDQLSLGNAALQITDVKLQDAGVYRCLISYGGADYKRITVKVNAPYNKINQRILVVDPVTSEHELTCQAEGYPKAEVIWTSSDHQVLSGKTTTTNSKREEKLFNVTSTLRINTTTNEIFYCTSRGLDPEKNQTAELVIPELPLAHPPNERT

SEQ ID NO: 1732 - protein, 221 aa, Artificial Sequence
  PD-L1 ECD v70
FTVTVPKDLYVVEYGSNMTIECKFPVEKQLDLAALSVYWEKEDKNIIQFVHGEEDLKVQHSSYRQRARLLKDQLSLGNAALQITDVKLQDAGVYRCLISYGGADYKRITVKVNAPYNKINQRILVVDPVTSEHELTCQAEGYPQAEVIWTSSDHQVLSGKTTTTNSKREEKLFNVTSTLRINTTTNEIFYCTFRGLDPEKNQTAEFVIPELPLAHPPNERT

SEQ ID NO: 1733 - protein, 221 aa, Artificial Sequence
  PD-L1 ECD v71
FTVTVPKDLYVVEYGSNMTIERKFPVEKQLDLAALIVYWEMEDKNIIQFVHGEEDLKVQHSSYRLRARLLKDQLSLGNAALQITDVKLQDAGVYRCMISYGGADYKRITVKVNAPYNKINQRISVVDPVTSEHELTCQAEGYPQAEVIWTSSDHQVLSGKTTTTNSKREEKLFNVTSTLRINTTTNEIFYCTFRGLDPENNQTAELVIPELPLAHPPNERL

SEQ ID NO: 1734 - protein, 221 aa, Artificial Sequence
  PD-L1 ECD v72
FTVTVPKDLYVVEYGSNVTIECKFPVEKQLDLAALIVYWEMEDKNIIQFVHGEEDLKVQHSSYRQRARLLKDQLSLGNAALQITDVKLQDAGVYRCMLSYGGADYKRITVKVNAPYNKINQRISVVDPVTSEHELTCQAEGYPKAEVIWTSSDHQVLSGKTTTTNSKREEKLFNVTSTLRINTTTNEIFYCTFRRLDTEENHTAEFVIPELPLAHPPNERT

SEQ ID NO: 1735 - protein, 221 aa, Artificial Sequence
  PD-L1 ECD v73
FTVTVPKDLYVVEYGSNMTIECKFPVEKQLDLAALIVYWEMEDKNIIQFVHGEEDLKVQHSSYRQRARLLKDQLSLGNAALQITDVKLQDAGVYRCMIGYGGADYKRITVKVNAPYSKINQRILVVDPVTSEHELTCQAEGYPKAEVVWTSSDHQVLSGKTTTTNSKREERLFNVTSTLSINTTTNEIFYCTFRRLDPEENHTAELVIPELPLAHPPNERT

SEQ ID NO: 1736 - protein, 221 aa, Artificial Sequence
  PD-L1 ECD v74
FTVTVPKDLYVVEYGSNMTIECKFPVEKQLDLAALTVYWEMEDKNIIQFVHGEEDLKVQHSSYRQRARLLKDQLSLGNAALQITDVKLQDAGVYRCLISYGGVDYKRITVKVNAPYNKINQRILVVDPVTSEHELTCQAEGYPKAEVIWTSSDHHVLSGKTTTTNSKREEKLFNVTSTLRINTTTNEIFYCTFRRLDPEENHTAELVIPELPLAHPPNERT

SEQ ID NO: 1737 - protein, 221 aa, Artificial Sequence
  PD-L1 ECD v75
FTVTVPKDLYVVEYGSNMTIECKFPVEIQLDLAALIVYWEMEDKNIIQFVHGEEDLKVQHSSYRQRARLLKDQLSLGNAALQITDVKLQDAGVYRCMIGYGGADYKRITVKVNAPYNKINQRILVVDPVTSEHELTCQAEGYPKAEVIWTSSDHQVLSGKTTTTNSKREEKLFNVTSTLRINTTTNEIFYCTFRRLDPEENHTAELVIPELPLAHPPNERT

SEQ ID NO: 1738 - protein, 221 aa, Artificial Sequence
  PD-L1 ECD v76
FTVTVPKDLYVVEYGSNMTIECKFPVEKQLDLAALIVYWEMEDKNIIQFVHGEEDLKVQHSSYRQRARLLKDQLSLGNAALQITDVKLQDAGVYRCMISYGGADYKRITVKVNAPYNKINQRILVVDPVTSEHELTCQAEGYPKAEVIWTSSDHQVLSGKTTTTNSKREEKLFNVTSTLRINTTTNEIFYCTFRSLDPEENHTAELVIPELPLAHPPNERT

SEQ ID NO: 1739 - protein, 221 aa, Artificial Sequence
  PD-L1 ECD v77
FTVTVPKDLYVVEYGSNMTIECKFPVEKQLDLAALIVYWEMEDKNIIQFVHGEEDLKVQHSSYRQRARLLKDQLSLGNTALQITDVKLQDAGVYRCMIGYGGADYKRITVKVNAPYNKINQRILVVDPVTSEHELTCQAEGYPKAEVIWTSSDHQVLSGKTTTTNSKREEKLFNVTSTLRINTTANEIFYCTFRGLDPEKNQTAEFVIPELPLAHPPNERT

SEQ ID NO: 1740 - protein, 221 aa, Artificial Sequence
  PD-L1 ECD v78
FTVTVPKDLYVVEYGSNMTIECKFPVEKQLDLAALIVYWEMEDKNIIQFVHGEEDLRVQHSSYRQRARLLKDQLSLGNAALQITDVKLQDAGVYRCMIGYGGADYKRITVKVNAPYNKINQRISVVDPVTSEHELTCQAEGYPQAEVIWTSSDHQVLSGKTTTTNSKREEKLFNVTSTLRINTTTNEIFYCTFRRLDPEENHTAELVIPELPLAHPPNERT

SEQ ID NO: 1741 - protein, 221 aa, Artificial Sequence
  PD-L1 ECD v79
FTVTVPKDLYVVEYGSNMTIECKFPVEKQLDLAALIVYWEMEDKNIIQFVHGEEDLRVQHSSYRQRARLLKDQLSLGNAALQITDVKLQDAGVYRCMIGYGGADYKRITVKVNAPYNKINQRILVVDPVTSEHELTCQAEGYPKAEVIWTSSDHQVLSGKTTTTNSKREEKLFNVTSTLRINTTTNEIFYCTFRGLDPEENHTAELVIPELPLAHPPNERT

SEQ ID NO: 1742 - protein, 221 aa, Artificial Sequence
  PD-L1 ECD v80
FTVTVPKDLYVVEYGSNMTIECKFPVEKQLDLAALIVYWEMEDKNIIQFVHGEEVLKVQHSSYRQRARLLKDQLSLGNAALQITDVKLQDAGVYRCLIGYGGADYKRITVKVNAPYNKINQRILVVDPVTSEHELTCQAEGYPKAEVIWTSSDHQVLSGKTTTTNSKREEKLFNVTSTLRINTTTNEIFYCTFRRLDPEENHTAELVIPELPLAHPPNERT

SEQ ID NO: 1743 - protein, 221 aa, Artificial Sequence
  PD-L1 ECD v81
FTVTVPKDLYVVEYGSNMTIECKFPVGKQLDLAALTVYWEMEDKNIIQFVHGEENLKVQHSSYRQRARLLKDQLSLGNAALQITDVKLQDAGVYRCLISYGGADYKRITVEVNAPYNKINQRILVVDPVTSEHELTCQAEGYPKAEVIWTSSDHQVLSGKTTTTNSKREEKLFNVTSTLRINTTTNEIFYCTFRRLDPEENHTAELVIPELPLAHPPNERT

SEQ ID NO: 1744 - protein, 221 aa, Artificial Sequence
  PD-L1 ECD v82
FTVTVPKDLYVVEYGSNMTIECKFPVEKQLDLAALIVYWEMEDKNIIQFVHGEGDLKVQHSSYRQRARLLKDQLSLGNAALQITDVKLQDAGVYRCLIGYGGADYKRITVKVNAPYNKINQRILVVDPVTSEHELTCQAEGYPKAEVIWTSSDHQVLSGKTTTTNSKREEKLFNVTSTLRINTTTNEIFYCTFRRLDPEENHTAELVIPELPLAHPPNERT

SEQ ID NO: 1745 - protein, 221 aa, Artificial Sequence
  PD-L1 ECD v83
FTVTVPKDLYVVEYASNMTIECKFPVEKQLDLAALTVYWEMEDKNIIQFVHGEEDLKVQHSSYRQRARLLKDQLSLGNAALQITDVKLQDAGVYRCLISYGGADYKRITVEVNAPYNKINQRILVVDPVTSEHELTCQAEGYPKAEVIWTSSDHQVLSGKTTTTNSKREEKLFNVTSTLRINTTTNEIFYCTFRRLDPEENQTAELVIPELPLAHPPNERT

SEQ ID NO: 1746 - protein, 221 aa, Artificial Sequence
  PD-L1 ECD v84
FTVTVPKDLYVVEYASNMTIECKFPVEKQLDLAALTVYWEMEDKNIIQFVHGEEDLKVQHSSYRQRARLLKDQLSLGNAALQITDVKLQDAGVYRCMISYGGADYKRITVKVNAPYNKINQRILVVDPDTSEHELTCQAEGYPKAEVIWTSSDHQVLSGKTTTTNSKREEKLFNVTSTLRINTTTNEIFYCTFRRLDPEENHTAELVIPELPLAHPPNERT

SEQ ID NO: 1747 - protein, 221 aa, Artificial Sequence
  PD-L1 ECD v85
FTVTVPKDLYVVEYASNMTIECKFPVEKQLDLAALTVYWEMEDKNIIQFVHGEEDLKVQHSSYRQRARLLKDQLSLGNAALQITDVKLQDAGVYRCMISYGGADYKRITVKVNAPYNKINQRILVVDPDTSEHELTCQAEGYPKAEVIWTSSDHQVLSGKTTTTNSKREEKLFNVTSTLRINTTTNEIFYCTFRGLDPEENHTAELVIPELPLAHPPNERT

SEQ ID NO: 1748 - protein, 221 aa, Artificial Sequence
  PD-L1 ECD v86
FTVTVPKDLYVVEYASNMTIECKFPVEKQLDLAALIVYWEMEDKNIIQFVHGEEDLKVQHSSYRQRARLLKDQLSLGNAALQITDVKLQDAGVYRCMISYGGADYKRITVKVNAPYNKINQRILVVDPDTSEHELTCQAEGYPKAEVIWTSSDHQVLSGKTTTTNSKREEKLFNVTSTLRINTTTNEIFYCTFRRLDPEENHTAELVIPELPLAHPPNERT

SEQ ID NO: 1749 - protein, 221 aa, Artificial Sequence
  PD-L1 ECD v87
FTVTVPKDLYVVEYGSNMTIECKFPVEKQLDLAALSVYWEMEDKNIIQFVHGEEDLKVQHSSYRQRARLLKDQLSLGNAALQITDVKLQDAGVYRCLISYGGADYKRITVKVNAPYNKINQRILVVDPVTSEHELTCQAEGYPKAEVIWTSSDHQVLSGKTTTTNSKREEKLFNVTSTLRINTTTNEIFYCTFRRLDPEENHTAELVIPELPLAHPPNERT

SEQ ID NO: 1750 - protein, 221 aa, Artificial Sequence
  PD-L1 ECD v88
FTVTVPKDLYVVEYGSNMTIECKFPVEKQLDLAALTVYWEMEDKNIIQFVHGEENLKVQHSSYRQRARLLKDQLSLGNAALQITDVKLQDAGVYRCLISYGGADYKRITVEVNAPYNKINQRILVVDPVTSEHELTCQAEGYPKAEVIWTSSDHQVLSGKTTTTNSKREEKLFNVTSTLRINTTTNEIFYCTFRRLDPEENHTTELVIPELPLAHPPNERT

SEQ ID NO: 1751 - protein, 221 aa, Artificial Sequence
  PD-L1 ECD v89
FTVTVPKDLYVVEYGSNMTIECKFPVEKQLDLAALTVYWEMEDKNIIQFVHGEENLKVQHSSYRQRARLLKDQLSLGNAALQITDVKLQDAGVYRCLISYGGADYKRITVEVNAPYNKINQRILVVDPATSEHELTCQAEGYPKAEVIWTSSDHQVLSGKTTTTNSKREEKLLNVTSTLRINTTTNEIFYCTFRRLDPEENHTAELVIPELPLAHPPNERT

SEQ ID NO: 1752 - protein, 221 aa, Artificial Sequence
  PD-L1 ECD v90
FTVTVPKDLYVVEYGSNMTIECKFPVEKQLDLAALTVYWEMEDKNIIQFVHGEESLKVQHSSYRQRARLLKDQLSLGNAALQITDVKLQDAGVYRCLISYGGADYKRITVEVNAPYNKINQRILVVDPVTSEHELTCQAEGYPKAEVVWTSSDHQVLSGKTTTTNSKREEKLFNVTSTLSINTTTNEIFYCTFRRLDPEENHTAELVIPELPLAHPPNERT

SEQ ID NO: 1753 - protein, 221 aa, Artificial Sequence
  PD-L1 ECD v91
FTVTVPKDLYVVEYGSNMTIECKFPVEKQLDLAALTVYWEMEDKNIIQFVHREEDLKVQHSSYRQRARLLKDQLSLGNAALQITDVKLQDAGVYRCLISYGGADYKRITVKANAPYNKINQRILVVDPVTSEHELTCQAEGYPEAEVIWTSSDHQVLSGKTTTTNSKREEKLFNATSTLRINTTTNEIFYCTFRRLDTEENHTAELVIPELPLAHPPNERT

SEQ ID NO: 1754 - protein, 221 aa, Artificial Sequence
  PD-L1 ECD v92
FTVTVPKDLYVVEYGSNMTIECKFPVEKQLDLAALTVYWEMEDKNVIQFVHGEEGLKVQHSSYRQRARLLKDQLSLGNAALQITDVKLQDAGVYRCLISYGGADYERITVKVNAPYNKINQRILVVDPVTSEHELTCQAEGYPEAEVIWTSSDHQVLSGKTTTTNSKREEKLFNVTSTLRINTTANEIFYCTFRGLDPEENHTAELVIPELPLAHPPNERT

SEQ ID NO: 1755 - protein, 221 aa, Artificial Sequence
  PD-L1 ECD v93
FTVTVPKDLYVVEYGSNMTIECKFPVEKQLDLAALTVYWEMEDKNIIQFVHGEEDLKVQHSSYRQRARLLKDQLSLGNAALQTTDVKLQDAGVYRCLISYGGADYKRITVKVNAPYNKINQRILVVDPVTSEHELTCQAEGYPEAEVIWTSSDHQVLSGKTTTTNSKREEKLFNVTSTLRINTTTNEIFYCTFRRLDTEENHTAELVIPELPLAHPPNERT

SEQ ID NO: 1756 - protein, 221 aa, Artificial Sequence
  PD-L1 ECD v94
FTVTVPKDLYVVEYGSNMTIECKFPVEKQLDLAALTVYWEMEDKNIIQFVHGEEDLKVQHSSYRQRARLLKDQLSLGNAALQITDVKLQDAGVYRCLISYGGADYKRITVEVNAPYNKINQRILVVDPVTSEHELTCQAEGYPKAEVIWTSSDHQVLSGKTTTTNSKREEKLFNVTSTLRINTTTNEIFYCTFRRLDPEENHTAELVIPELPLAHPPNERT

SEQ ID NO: 1757 - protein, 221 aa, Artificial Sequence
  PD-L1 ECD v95
FTVTVPKDLYVVEYGSNMTIECKFPVEKQLDLAALTVYWEMEDKNIIQFVHGEEDLKVQHSSYRQRARLLKDQLSLGNAALQITDVKLQDAGVYRCLISYGGADYKRITVKVNAPYNKINQRILVVDPVTSEHELTCQAEGYPEAEVIWTSSDHQVLSGKTTTTNSKREEKLFNVTSTLRINTTTNEIFYCTFRRLDTEENHTAELVIPELPLAHPPNERT

SEQ ID NO: 1758 - protein, 221 aa, Artificial Sequence
  PD-L1 ECD v96
FTVTVPKDLYVVEYGSNMTIECKFPVEKQLDLAALTVYWEMEDKNIIQFVHGEEDLKVQHSSYRQRARLLKDQLSLGNAALQITDVKLQDAGVYRCLISYGGADYKRITVKVNAPYNKINQRILVVDPVTSEHELTCQAEGYPKAEVIWTSSDHHVLSGKTTTTNSKREEKLFNVTSTLRINTTTNEIFYCTSRRLDPEEYHTAELVIPELPLAHPPNERT

SEQ ID NO: 1759 - protein, 221 aa, Artificial Sequence
  PD-L1 ECD v97
FTVTVPKDLYVVEYGSNMTIECKFPVEKQLDLAALTVYWEMEDKNIIQFVHGEEDLKVQHSSYRQRARLLKDQLSLGNAALQITDVKLQDAGVYRCLISYGGADYKRITVKVNAPYNKINQRILVVDPDTSEHELTCQAEGYPKAEVIWTSSDHQVLSGKTTTTNSKREEKLFNVTSTLRINTTTNEIFYCTFRRLDPEENHTAELVIPELPLAHPPNERT

SEQ ID NO: 1760 - protein, 221 aa, Artificial Sequence
  PD-L1 ECD v98
FTVTVPKDLYVVEYGSNMTIECKFPVEKQLDLAAPSVYWEMEDKNIIQFVHGEEDLKVQHSSYRQRARLLKDQLSLGNAALQITDVKLQDAGVYRCLISYGGADYKRITVEVNAPYNKINQRILVVDPVTSEHELTCQAEGYPKAEVIWTSSDHQVLSGKTTTTNSKREEKLFNVTSTLRINTTTNEIFYCTFRRLDPEENHTAELVIPELPLAHPPNERT

SEQ ID NO: 1761 - protein, 221 aa, Artificial Sequence
  PD-L1 ECD v99
FTVTVPKDLYVVEYGSNITIECKFPVEKQLDLAALTVYWEMEDKNIIQFVHGGEDLKVQHSSYRQRARLLKDQLSLGNAALQITDVKLQDAGVYRCLISYGGADYKRITVKVNAPYNKINQRILVVDPVTSEHELTCQAEGYPEAEVIWTSSDHQVLSGKTTTTNSKREEKLFNVTSTLRINTTTNEIFYCTFRRLDPGENHTAELAIPELPLAHPPNERT

SEQ ID NO: 1762 - protein, 221 aa, Artificial Sequence
  PD-L1 ECD v100
FTVTVPKDLYVVEYGSNTTIECKFPVEKQLDLAALTVYWEMEDKNIIQFVHGEENLKVQHSSYRQRARLLKDQLSLGNAALQITDVKLQDAGVYRCLISYGGADYKRITVEVNAPYNKINQRILVVDPVTSEHELTCQAEGYPKAEVIWTSSDHQVLSGKTTTTNSKREEKLFNVTSTLRINTTTNEIFYCTFRRLDPEENHTAELVIPELPLAHPPNERT

SEQ ID NO: 1763 - protein, 221 aa, Artificial Sequence
  PD-L1 ECD v101
FTVTVPKDLYVVEYGSNVTIECKFPVEKQLDLAALIVYWEMEDKNIIQFVHGEEDLKVQHSSYRQRARLLKDQLSLGNAALQITDVKLQDAGVYRCLISYGGADYKRITVKVNAPYNKINQRILVVDPVTSEHELTCQAEGYPKAEVIWTSSDHQVLSGKTTTTNSKREEKLFNVNSTLRINTTTNEIFYCTFRGLDPEENHTAELVIPELPLAHPPNERT

SEQ ID NO: 1764 - protein, 221 aa, Artificial Sequence
  PD-L1 ECD v102
FTVTVPKDLYVVEYGSNMTIECKFPVEKQLDLAALIVYWEMEDKNIIQFVHGEEDLKVQHSSYRQRARLLKDQLSLGNAALQITDVKLQDAGVYRCLIGYGGADYKRITVKVNAPYNKINQRILVVDPVTSEHELTCQAEGYPKAEVIWTSSDHQVLSGKTTTTNSKREEKLFNVTSTLRINTTTNEIFYCTFRRLDPEENHTAELVIPELPLAHPPNERT

SEQ ID NO: 1765 - protein, 221 aa, Artificial Sequence
  PD-L1 ECD v103
FTVTVPKDLYVVEYGSDMTIECKFPVEKQLDLAALIVYWEMEDKNIIQFVHGEEDLKVQHSSYRQRARLLKDQLSLGNAALQITDVKLQDAGVYRCLIGYGGADYKRITVKVNAPYNKINQRILVVDPVTSEHELTCQAEGYPKAEVIWTSSDHQVLSGKTTTTNSKREEKLFNVTSTLRINTTTNEIFYCTFRRLDPEENHTAELVIPELPLAHPPNERT

SEQ ID NO: 1766 - protein, 221 aa, Artificial Sequence
  PD-L1 ECD v104
FTVTVPKDLYVVEYGSNMTIECKFPVEKQLDLAALIVYWEMEDKNIIQFVHGEEDLKVQHSSYRQRARLLKDQLSLGNAALQITDVKLQDAGVYRCMIGYGGADYKRITVKVNAPYNKINQRILVVDPVTSEHELTCQAEGYPKAEVIWTSSDHQVLSGKTTTTNSKREEKLFNVTSTLRINTTANEIFYCTFRGLDTEENHTAELVIPELPLAHPPNERT

SEQ ID NO: 1767 - protein, 221 aa, Artificial Sequence
  PD-L1 ECD v105
FTVTVPKDLYVVEYGSNMTIECKFPVEKQLDLAALIVYWEMEDKNIIQFVHGEEDLKVQHSSYRQRARLLKDQLSLGNAALQITDVKLQDAGVYRCMISYGGADYKRITVKVNAPYNKINQRILVVDPDTSEHELTCQAEGYPKAEVIWTSSDHQVLSGKTTTTNSKREEKLFNVTSTLRINTTTNEIFYCTFRRLDPEENQTAELVIPELPLAHPPNERT

SEQ ID NO: 1768 - protein, 221 aa, Artificial Sequence
  PD-L1 ECD v106
FTVTVPKDLYVVEYGSNMTIECKFPVEKQLDLAALIVYWEMEDKNIIQFVHGEEDLKVQHSSYRQRARLLKDQLSLGNAALQITDVKLQDAGVYRCMISYGGADYKRITVKVNAPYNKINQRILVVDPDTSEHELTCQAEGYPKAEVIWTSSDHQVLSGKTTTTNSKREEKLFNVTSTLRINTTTNEIFYCTFRRLDTEENHTAELVIPELPLAHPPNERT

SEQ ID NO: 1769 - protein, 221 aa, Artificial Sequence
  PD-L1 ECD v107
FTVTVPKDLYVVEYGSNMTIECKFPVEKQLDLAALIVYWEMEDKNIIQFVHGEEDLKVQHSSYRQRARLLKDQLSLGNAALQITDVKLQDAGVYRCMISYGGADYKRITVKVNAPYNKINQRILVVDPDTSEHELTCQAEGYPKAEVIWASSDHQVLSGKTTTTNSKREEKLFNVTSTLRINTTTNEIFYCTFRRLDPEENHTAELVIPELPLAHPPNERT

SEQ ID NO: 1770 - protein, 221 aa, Artificial Sequence
  PD-L1 ECD v108
FTVTVPKDLYVVEYGSNMTIECKFPVEKQLDLAALIVYWEMEDKNIIQFVHGEEDLKVQHSSYRQRARLLKDQLSLGNAALQITDVKLQDAGEYRCMISYGGADYKRITVKVNAPYNKINQRILVVDPDTSEHELTCQAEGYPKAEVIWTSSDHQVLSGKTTTTNSKREEKLFNVTSTLRINTTTNEIFYCTFRRLDPEENHTAELVIPELPLAHPPNERT

SEQ ID NO: 1771 - protein, 221 aa, Artificial Sequence
  PD-L1 ECD v109
FTVTVPKDLFVVEYGSNVTIECKFPVEKQLDLAALIVYWEMEDKNIIQFVHGEEDLKVQHSSYRQRARLLKDQLSLGNAALQITDVKLQDAGVYRCMIGYGGADYKRITVKVNAPYNKINQRILVVDPVTSEHELTCRAEGYPKAEVIWTSSDHQVLSGKTTTTNSKREEKLFNVTSTLRINTTTNEIFYCTFRRLDPEENHAAELVIPELPLAHPPNERT

SEQ ID NO: 1772 - protein, 221 aa, Artificial Sequence
  PD-L1 ECD v110
FTVTVPKDLYVVEYGSNMTIECKFPVEKQLDLAALIVYWEMEDKDIIQFVHGEEDLKVQHSSYRQRARLLKDQLSLGNAALQITDVKLQDAGVYRCMISYGGADYKRITVKVNAPYNKINQRILVVDPVTSEHELTCQAEGYPKAEVIWTSSDHQVLSGKTTTTNSKREEKLFNVTSTLRINTTTNEIFYCTFRRLDPEENHTAELVIPELPLAHPPNERT

SEQ ID NO: 1773 - protein, 221 aa, Artificial Sequence
  PD-L1 ECD v111
FTVTVPKDLYVVEYGSNMTIECKFPVEKQLDLAALIVYWEMEDKNIIQFVHGEEDLKVQHSSYRQRARLLKDQLSLGNAALQITDVKLQDAGVYRCMISYGGADYKRITVKVNAPYNKINQRILVVDPVTSEHELTCQAEGYPKAEVIWTSSDHQVLSGMTTTTNSKREEKLFNVTSTLRINTTTNEIFYCTFRGLDPEENHTAELVIPELPLAHPPNERT

SEQ ID NO: 1774 - protein, 221 aa, Artificial Sequence
  PD-L1 ECD v112
FTVTVPKDLYVVEYGSNMTIECKFPVEKQLDLAALIVYWEMEDKDIIQFVHGEEDLKVQHSSYRQRARLLKDQLSLGNAALQITDVKLQDAGVYRCMISYGGADYKRITVKVNAPYNKINQRILVVDPVTSEHELTCQAEGYPEAEVIWTSSDHQVLSGKTTTTNSKREEKLFNVTSTLRINTTTNEIFYCTFRRLDPEENHTAELVIPELPLAHPPNERT

SEQ ID NO: 1775 - protein, 221 aa, Artificial Sequence
  PD-L1 ECD v113
FTVTVPKDLYVVEYGSNMTIECKFPVEKQLDLAALIVYWEMEDKDIIQFVHGEEDLKVQHSSYRQRARLLKDQLSLGNAALQITDVKLQDAGVYRCMISYGGADYKRITVKVNAPYNKINQRILVVDPVTSEHELTCQAEGYPKAEVIWTSSDHQVLSGKTTTTNSKREEKLFNVTSTLRINTTTNEIFYCTFRRLDSEENHTAELVIPELPLAHPPNERT

SEQ ID NO: 1776 - protein, 221 aa, Artificial Sequence
  PD-L1 ECD v114
FTVTVPKDLYVVEYGSNMTIECKFPVEKQLDLAALIVYWEMEDKDIIQFVHGEEDLKVQHSSYRQRARLLKDQLSLGNAALQITDVKLQDAGVYRCMISYGGADYKRITVKVNAPYNKINQRILVVDPVTSEHELTCQAEGYPKAEVIWTSSDHQVLSGKTTTTNSKREEKLFNVTSTLRINTTTNEIFYCTFRRLDTEENHTAELVIPELPLAHPPNERT

SEQ ID NO: 1777 - protein, 221 aa, Artificial Sequence
  PD-L1 ECD v115
FTVTVPKDLYVVEYGSNMTIECKFPVEKQLDLAALIVYWEMEDKDIIQFVHGEEDLKVQHSSYRQRARLLKDQLSLGNAALQITDVKLQDAGVYRCMISYGGADYKRITVKVNAPYNKINQRILVVDPVTSEHELTCQAEGYPKAEVIWTSSDHQVLSGKTTTTNSKREEKLFNVTSTLRINTTTNEIFYCTFRGLDPEENHTAELVIPELPLAHPPNERT

SEQ ID NO: 1778 - protein, 221 aa, Artificial Sequence
  PD-L1 ECD v116
FTVTVPKDLYVVEYGSNMTIECKFPVEKQLDLAALIVYWEMEDKDIIQFVHGEEDLKVQHSSYRQRARLLKDQLSLGNAALQITDVKLQDAGVYRCMISYGGADYKRITVKVNAPYNKINQRILVVDPVTSEHELTCQAEGYPKAEVIWTSSDHQVLSGKTTTTNSKREEKLFNVTSTLRINTTTNEIFYCTFRSLDPEENHTAELVIPELPLAHPPNERT

SEQ ID NO: 1779 - protein, 221 aa, Artificial Sequence
  PD-L1 ECD v117
FTVTVPKDLYVVEYGSNMTIECKFPVEKQLDLAALIVYWEMEDKDIIQFVHGEEDLKVQHSSYRQRARLLKDQLSLGNAALQITDVKLQDAGVYRCMISYGGADYKRITVKVNAPYNKINQRILVVDPVTFEHELTCQAEGYPKAEVIWTSSDHQVLSGKTTTTNSKREEKLFNVTSTLRINTTTNEIFYCTFRRLDPEENHTAELVIPELPLAHPPNERT

SEQ ID NO: 1780 - protein, 221 aa, Artificial Sequence
  PD-L1 ECD v118
FTVTVPKDLYVVEYGSNMTIECKFPVEKQLDLAALIVYWEMEDKDIIQFVHGEEDLKDQHSSYRQRARLLKDQLSLGNAALQITDVKLQDAGVYRCMISYGGADYKRITVKVNAPYNKINQRILVVDPVTSEHELTCQAEGYPKAEVIWTSSDHQVLSGKTTTTNSKREEKLFNVTSTLRINTTTNEIFYCTFRRLDPEENHTAELVIPELPLAHPPNERT

SEQ ID NO: 1781 - protein, 221 aa, Artificial Sequence
  PD-L1 ECD v119
FTVTVPKDLYVVEYGSNMTIECKFPVEKQLDLAALIVYWEMEDKNIIQFVHGEEDLKVQHSSYRQRARLLKDQLSLGNAALQITDVKLQDAGVYRCMISYGGADYKRITVKVNAPYNKINQRILVVDPDTSEHELTCQAEGYPKAEVIWTSSDHQVLSGKTTTTNSKREEKLFNVTSTLRINTTTNEIFYCTFRSLDPEENHTAELVIPELPLAHPPNERT

SEQ ID NO: 1782 - protein, 221 aa, Artificial Sequence
  PD-L1 ECD v120
FTVTVPKDLYVVEYGSNMTIECKFPVEKQLDLAALIVYWEMEDKNIIQFVHGEEDLKVQHSSYRQRARLLKDQLSLGNAALQITDVKLQDAGVYRCMTSYGGADYKRITVKVNAPYNKINQRILVVDPVTSEHELTCQAEGYPKAEVIWTSSDHQVLSGKTTTTNSKREEKLYNVTSTLRINTTTNEIFYCTFRRSDPEENHTAELVIPELPLAHPPNERT

SEQ ID NO: 1783 - protein, 221 aa, Artificial Sequence
  PD-L1 ECD v121
FTVTVPKDLYVVEYGSNMTIECKFPVEKQLDLAALIVYWEMEDKDIIQFVHGEEDLKVQHSSYRQRARLLKDQLSLGNAALQITDVKLQDAGVYRCMISYGGADYKRITVKVNAPYNKINQRILVVDPVTSEHGLTCQAEGYPKAEVIWTSSDHQVLSGKTTTTNSKREEKLFNVTSTLRINTTTNEIFYCTFRRLDPEENHTAELVIPELPPAHPPNERT

SEQ ID NO: 1784 - protein, 221 aa, Artificial Sequence
  PD-L1 ECD v122
FTVTVPKDLYVVEYGSNMTIECKFPVEKQLDLAALIVYWEMEDKDIIQFVHGEEDLKVQHSSYRQRARLLKDQLSLGNAALQITDVKLQDAGVYRCMISYGGADYKRITVKVNAPYNKINQRILVVDPVTSEHELTCQAEGYPKAEVIWTSSDHQVLSGKTTTTNSKREEKLINVTCTLRINTTTNEIFYCTFRRLDPEENHTAELVIPELPLAHPPNERT

SEQ ID NO: 1785 - protein, 221 aa, Artificial Sequence
  PD-L1 ECD v123
FTVTVPKDLYVVEYGSNMTIECKFPVEKQLDLAALIVYWEMEDKDIIQFVHGEEDLKVQHSSYRQRARLLKDQLSLGNAALQITDVKLQDAGVYRCMISYGGADYKRITVKVNAPYNKINQRILVVDPVTSEHELTCQAEGYPKAEVVWTSSDHQVLSGKTTTTNSKREEKLFNVTSTLRINTTTNEIFYCTFRGLDPEENHTAELVIPELPLAHPPNERT

SEQ ID NO: 1786 - protein, 221 aa, Artificial Sequence
  PD-L1 ECD v124
FTVTVPKDLYVVEYGSNMTIECKFPVEKQLDLAALIVYWEMEDKDIIQFVHGEEDLKVQHSSYRQRARLLKDQLSLGNAALQITDVKLQDAGVYRCMISYGGADYKRITVTVNAPYNKINQRILVVDPVTSEHELTCQAEGYPKAEVIWTSSDHQVLSGKTTTTNSKREEKLFNVTSTLRINTTTNEIFYCTFRGLDPEENHTAELVIPELPLAHPPNERT

SEQ ID NO: 1787 - protein, 221 aa, Artificial Sequence
  PD-L1 ECD v125
FTVTVPKDLYVVEYGSNMTIECKFPVEKQLDLAALIVYWEMEDKDIIQFVHGEEDLKVQHSSYRQRARLLKDQLSLGNAALQITDVKLQDAGVYRCMISYGGADYKRITVKVYAPYNKINQRILVVDPVTSEHELTCQAEGYPKAEVIWTSSDHQVLSGKTTTTNSKREEKLFNVTSTLRINTTTNEIFYCTFRSLDPEENHTAELVIPELPLAHPPNERT

SEQ ID NO: 1788 - protein, 221 aa, Artificial Sequence
  PD-L1 ECD v126
FTVTVPKDLYVVEYGSNMTIECKFPVEKQLDLAALIVYWEMEDKDIIQFVHGEEDLKVQHSSYRQRARLLKDQLSLGNAALQITDVKLQDAGVYRCMISYGGADYKRITVKVNAPYNKINQRILVVDPVTSEHELTCQAEGYPKAEVIWTSSDHQVLSGKTTTTYSKREGKLFNVTSTLRINTTTNEIFYCTFRRLDPEENHTAELVIPELPLAHPPNERT

SEQ ID NO: 1789 - protein, 221 aa, Artificial Sequence
  PD-L1 ECD v127
FTVTVPKDLYVVEYGSNMTIECKFPVEKQLDLAALIVYWEMEDKDIIQFVHGEEDLKVQHSSYRQRARLLKDQLSLGNAALQITDVKLRDAGVYRCMVSYGGADYKRITVKVNAPYNKINQRILVVDPVTSEHELTCQAEGYPKAEVIWTSSDHQVLSGKTTTTNSKREEKLFNVTSTLRINTTTNEIFYCTFRRLDPEENHTAELVIPELPLAHPPNERT

SEQ ID NO: 1790 - protein, 221 aa, Artificial Sequence
  PD-L1 ECD v128
FTVTVPKDLYVVEYGSNMTIECKFPVEKQLDLAALIVYWEMEDKDIIQFVHGEEDLKVQHSSYRQRARLLKDQLSLGNAALQITDVKLQDAGVYRCMISYGGADYKRITVKVNAPYNKINQRILVVDPVTFEHELTCQAEGYPKAEVIWTSSDHQVLSGKTTTTNSKREEKLFNVTSTLRINTTTNEIFYCTFRRLDSEENHTAELVIPELPLAHPPNERT

SEQ ID NO: 1791 - protein, 221 aa, Artificial Sequence
  PD-L1 ECD v129
FTVTVPKDLYVVEYGSNMTIECKFPVEKQLDLAALIVYWEMEDKDIIQFVHGEEDLKVQHSSYRQRARLLKDQLPLGNAALQITDVKLQDAGVYRCMISYGGADYKRITVKVNAPYNKINQRILVVDPVTSEHELTCQAEGYPKAEVIWTSSDHQVLSGKTTTTNSKREEKLFNVTSTLRINTTTNEIFYCTFRRLDSEENHTAELVIPELPLAHPPNERT

SEQ ID NO: 1792 - protein, 221 aa, Artificial Sequence
  PD-L1 ECD v131
FTVTVPKDLYVVEYGSNMTIECKFPVEKQLDLAALIVYWEMEDKDIIQFAHGEEDLKVQHSSYRQRARLLKDQLSLGNAALQITDVKLQDAGVYRCMISYGGADYKRITVKVNAPYNKINQRILVVDPVTSEHELTCQAEGYPKAEVIWTSSDHQVLSGKTTTTNSKREEKLFNVTSTLRINTTTNEIFYCTFRTLDPEENHTAELVIPELPLAHPPNERT

SEQ ID NO: 1793 - protein, 221 aa, Artificial Sequence
  PD-L1 ECD v131
FTVTVPKDLYVVEYGSNMTIECKFPVDKQLDLAALIVYWEMEDKDIIQFVHGEEDLKVQHSSYRQRARLLKDQLSLGNAALQITDVKLQDAGVYRCMISYGGADYKRITVKVNAPYNKINQRILVVDPVTSEHELTCQAEGYPKAEVIWTSSDHQVLSGKTTTTNSKREEKLFNVTSTLRINATTNEVFYCTFRRLDPEENHTAELVIPELPLAHPPNERT

SEQ ID NO: 1794 - protein, 221 aa, Artificial Sequence
  PD-L1 ECD v132
FTVTVPKDLYVVEYGSNMTIECKFPVEKQLDLAALIVYWEMEDKNIIQFVHGEEDLKVQHSSYRQRARLLKDQLSLGNAALQITDVKLQDAGVYRCMISYGGADYKRITVKVNAPYNKINQRILVVDPVTSEHELTCQAEGYPKAEVIWTSSDHQVLSGKTTTTNSKREEKLYNVTSTLRINITTNEIFYCTFRRSDPEENHAAELVIPELPLAHPPNERT

SEQ ID NO: 1795 - protein, 221 aa, Artificial Sequence
  PD-L1 ECD v133
FTVTVPKDLYVVEYGSNMTIECNFPVEKQLDLAALIVYWEMEDKDIIQFVHGEEDLKVQHSSYRQRARLLKDQLPLGNAALQITDVKLQDAGVYRCMISYGGADYKRITVKVNAPYNKISQRILVVDPVTSEHELTCQAEGYPKAEVIWTSSDHQVLSGKTTTTNSKREEKLFNVTSTLRINTTTNEIFYCTFRRLDPEENHTAELVIPELPLAHPPNERT

SEQ ID NO: 1796 - protein, 221 aa, Artificial Sequence
  PD-L1 ECD v134
FTVTVPKDLYVVEYGSNMTIECKFPVEKQLDLAALIVYWEMEDKDIIQFVHGEEDLKVQHSSYRQRARLLKDQLSLGNAALQITDVKLQDAGVYRCMISYGDADYKRITVKVNAPYNKINQRILVVDPVTSEHELTCQAEGYPKAEVIWTSSDHQVLSGKTTTTNSKREEKLFNVTSTLRINTTTNEIFYCTFWGLDPEENHTAELVIPELPLAHPPNERT

SEQ ID NO: 1797 - protein, 221 aa, Artificial Sequence
  PD-L1 ECD v135
FTVTVPKDLYVVEYGSNMTIECKFPVEKQLDLAALIVYWEMEDKDIIQFVHVEEDLKVQHSSYRQRARLLKDQLSLGNAALQITDVKLQDAGVYRCMISYGGADYKRITVKVNAPYNKINLRILVVDPVTSEHELTCQAEGYPKAEVIWTSSDHQVLSGKTTTTNSKREEKLFNVTSTLRINTTTNEIFYCTFRRLDSEENHTAELVIPELPLAHPPNERT

SEQ ID NO: 1798 - protein, 221 aa, Artificial Sequence
  PD-L1 ECD v136
FTVTVPKDLYVVEYGSNMTIECKFPVEKQLDLAALIVYWEMEDKDIIQFVHGEEDLKVQHSSYRQRARLLKDQLSLGNAALQITDVKLQDAGVYRCMISYGGADYKRITVKVNAPYNKINQRILVVDPVTSEHELTCQAEGYPKAEVVWTSSDHQVLSGKTTTTNSKREEKLFNVTSTLRINTTTNEIFYCTFRGLDPEEDHTAELVIPELPLAHPPNERT

SEQ ID NO: 1799 - protein, 221 aa, Artificial Sequence
  PD-L1 ECD v137
FTVTVPKDLYVVEYGSNMTIECKFPVEKQLDLAALIVYWEMEDKDIIQFVHGEEDLKVQHSSYRQRARLLKDQLSLGNAALQITDVKLQDAGVYRCMISYGGADYKRITVTVNAPYNKINQRILVVDPVTSEHELTCQAEGYPKAEVIWTSSDHQVLSGKTTTTNSKREEKLFNVTSTLRINATTNEVFYCTFRRLDPEENHTAELVIPELPLAHPPNERT

SEQ ID NO: 1800 - protein, 221 aa, Artificial Sequence
  PD-L1 ECD v138
FTVTVPKDLYVVEYGSNMTIECKFPVEKQLDLAALIVYWEMEDKDIIQFVHGEEDLKVQHSSYRQRARLLKDQLSLGNAALQITDVKLRDAGVYRCMISYGGADYKRITVKVNAPYNKINQRILVVDPVTSEHELTCQAEGYPKAEVIWTSSDHQVLSGKTTTTNSKREEKLFNVTSTLRINTTTNEISYCTFRRLDSEENHTAELVIPELPLAHPPNERT

SEQ ID NO: 1801 - protein, 221 aa, Artificial Sequence
  PD-L1 ECD v139
FTVTVPKDLYVVEYGSNMTIECKFPVEKQLDLAALIVYWEMEDKDIIQFVHGEEDLKVQHSSYRQRARLLKDQLSLGNAALQITDVKLQDAGVYRCMIGYGGADYKRITVKVNAPYNKINQRILVVDPVTSEHELTRQAEGYPKAEVIWTSSDHQVLSGKTTTTNSKREEKLFNVTSTLRINTTTNEIFYCTFRRLDPEENHTAELAIPELPLAHPPNERT

SEQ ID NO: 1802 - protein, 221 aa, Artificial Sequence
  PD-L1 ECD v140
FTVTVPKDLYVVEYGSNMTIECKFPVEKQLDLAALIVYWEMEDKDIIQFVHGEEDLKVQHSSYRQRARLLKDQLSLGNAALQITDVKLQDAGVYRCMISYGGADYKRITVKVNAPYNKINQRILVVDPVTSEHELTCQAEGYPKAEVIWTSSDHQVLSGKTTITNSRREEKLFNVTSTLRINTTTNEIFYCTFRGLDPEENHTAELVIPELPLAHPPNERT

SEQ ID NO: 1803 - protein, 221 aa, Artificial Sequence
  PD-L1 ECD v141
FTVTVPKDLYVVEYGSNMTIECKFPVEKQLDLAALIVYWEMEDKDIIQFVHGEEDLKVQHSSYRQRARLLKDQLSLGNAALQITDVKLQDAGVYRCMISYGGADYKRITVKVNAPYNKINQRILVVDPVTSEHELTCQAEGYPKAEVIWTSSDHQVLSGKTTTTNSKREEKLFNVTSTLRINATTNEIFYCSFGRLDPEENHTAELVIPELPLAHPPNERT

SEQ ID NO: 1804 - protein, 221 aa, Artificial Sequence
  PD-L1 ECD v142
FTVTVPKDLYVVEYGSNMTIECKFPVEKQLDLAALIVYWEMEDKDIIQFAHGEEDLKVQHSSYRQRARLLKDQLSLGNAALQITDVKLQDAGVYRCMISYGGADYKRITVKVNAPYNKTNQRILVVDPVTSEHELTCQAEGYPEAEVIWTSSDHQVLSGKTTTTNSKREEKLFNVTSTLRINTTTNEIFYCTFRRLDPEENHTAELVIPELPLAHPPNERT

SEQ ID NO: 1805 - protein, 221 aa, Artificial Sequence
  PD-L1 ECD v143
FTVTVPKDLYVVEYGSNMAIECKFPVEKQLDLAALIVYWEMEDKDIIQFVHGEEDLKVQHSSYRQRARLLKDQLSLGNAALQITDVKLQDAGVYRCMISYGGADYKRITVKVNAPYNKINQRILVVDPVTSEHELTCQAEGYPEAEVIWTSSDHQVLSGKTTTTNSKREEKLFNVTSTLRINTTTNEIFYCTFRGLDPEENHTAELVIPELPLAHPPNERT

SEQ ID NO: 1806 - protein, 221 aa, Artificial Sequence
  PD-L1 ECD v144
FTVTVPKDLYEVEYGSNMTIECKFPVEKQLDLAALIVYWEMEDKDIIQFVHGEEDLKVQHSSYRQRARLLKDQLSLGNAALQITDVKLQDAGVYRCMISYGGADYKRITVKVNAPYNKINQRILVVDPVASEHELTCQAEGYPKAEVIWTSSDHQVLSGKTTTTNSKREEKLFNVTSTLRINTTTNEIFYCTFRRLDTEENHTAELVIPELPLAHPPNERT

SEQ ID NO: 1807 - protein, 221 aa, Artificial Sequence
  PD-L1 ECD v145
FTVTVPKDLYVVEYGSNMTIECKFPAEKQLDLAALIVYWEMEDKDIIQFVHGEEDLKVQHSSYRQRARLLKDQLSLGNAALQITDVKLQDAGVYRCMISYGGADYKRITVKVNAPYNKINQRILVVDPVTSEHELTCQAEGYPKAEVIWTSSDHQVLSGKTTITNSKREEKLFNVTSTLRINTTANEIFYCTFRRLDPEENHTAELVIPELPLAHPPNERT

SEQ ID NO: 1808 - protein, 221 aa, Artificial Sequence
  PD-L1 ECD v146
FTVTVPKDLYVVEYGSNMTIECNFPVEKQLDLAALIVYWEMEDKDIIQFVHGEEDLKVQHSSYRQRARLLKDQLSLGNAALQITDVKLQDAGVYRCMISYGGADYKRITVKVNAPYNKINQRISVVDPVTSEHELTCQAEGYPKAEVIWTSSDHQVLSGKTTTTNSTREEKLFNVTSTLRINTTTNEIFYCTFRGLDPEENHTAELVIPELPLAHPPNERT

SEQ ID NO: 1809 - protein, 221 aa, Artificial Sequence
  PD-L1 ECD v147
FTVTVPKDLYVVEYGSNMTIECNFPVEKQLDLAALIVYWEMEDKDIIQFVHGEEDLKVQHSSYRQRARLLKDRLSLGNAALQITDVKLQDAGVYRCMISYGGADYKRITVKVNAPYNKINQRILVVDPVTSEHELTCQAEGYPKAEVIWTSSDHQVLSGKTTITNSKREEKLFNVTSTLRINTTTNEIFYCTFRRLDPEENHTAELVIPELPLAHPPNERT

SEQ ID NO: 1810 - protein, 221 aa, Artificial Sequence
  PD-L1 ECD v148
FTVTVPKDLYVVEYGSNMTIECKFPVEEQLDLAALIVYWEMEDKDIIQFVHGEEDLKVQHSSYRQRARLLKDQLSLGNAALQITDVKLQDAGVYRCMISYGGADYKRITVKVNAPYNKINQRILVVDPVTSEHELTCQAEGYPKAEVIRTSSDHQVLGGKTTTTNSKREEKLFNVTSTLRINTTTNEIFYCTFRRLDTEENHTAELVIPELPLAHPPNERT

SEQ ID NO: 1811 - protein, 221 aa, Artificial Sequence
  PD-L1 ECD v149
FTVTVPKDLYVVEYGSNMTIECKFPVERQLDLAALIVYWEMEDKDIIQFVHGEEDLEVQHSSYRQRARLLKDQLSLGNAALQITDVKLQDAGVYRCMVSYGGADYKRITVKVNAPYNKINQRILVVDPVTSEHELTCQAEGYPKAEVIWTSSDHQVLSGKTTTTNSKREEKLFNVTSTLRINTTTNEIFYCTFRSLDPEENHTAELVIPELPLAHPPNERT

SEQ ID NO: 1812 - protein, 221 aa, Artificial Sequence
  PD-L1 ECD v150
FTVTVPKDLYVVEYGSNMTIECKFPVERQLDLAALIVYWEMEDKDIIQFVHGEEDLKVQHSSYRQRARLLKDQLSLGNAALQITDVKLQDAGVYRCMISYGGADYKRITVKVNAPYNKINQRILVVDPDTSEHELTCQAEGYPKAEVIWTSSDHQVLSGKTTNTNSKREEKLFNVTSTLRINTTTNEIFYCTFRTLDPEENHTAELVIPELPLAHPPNERT

SEQ ID NO: 1813 - protein, 221 aa, Artificial Sequence
  PD-L1 ECD v151
FTVTVPKDLYVVEYGSNMTIECKFPVEKQLDLAALIVYWEKEGKDIIQFVHGEEDLKVQHSSYSQRARLLKDQLSLGNAALQITDVKLQDAGVYRCMISYGGADYKRITVKVNAPYNKINQRILVVDPVTSEHELTCQAEGYPKAEVIWTSSDHQVLSGKTTTTNSKREEKLFNVTSTLRINTTTNEIFYCTFRGLDPEENHTAELVIPELPLAHPPNERT

SEQ ID NO: 1814 - protein, 221 aa, Artificial Sequence
  PD-L1 ECD v152
FTVTVPKDLYVVEYGSNMTIECKFPVEKQLDLAALIVYWEKEGKDIIQFVHGEEDLKVQHSSYSQRARLLKDQLSLGNAALQITDVKLQDAGVYRCMIGYGGADYKRITVKVNAPYNKINQRILVVDPVTSEHELTCQAEGYPKAEVIWTSSDHQVLSGKTTTTNSKREEKLFNVTSTLRINTTTNEIFYCTFRRLDPEENHTAELVIPELPLAHPPNERT

SEQ ID NO: 1815 - protein, 221 aa, Artificial Sequence
  PD-L1 ECD v153
FTVTVPKDLYVVEYGSNMTIECKFPVEKQLDLAALIVYWEMEDKDIIQFVHGEEDLKVQHSSYRQRALLLKDQLSLGNAALQITDVKLQDAGVYRCMISYGGADYKRITVKVNAPYNKINQRILVVDPVTSEHELTCQAEGYPKAEVIWTSSDHQVLSGKTTTTNSKREEKLLNVTSTLRINTTTNEIFYCTFRRLGSEENHTAELVIPELPLAHPPNERT

SEQ ID NO: 1816 - protein, 221 aa, Artificial Sequence
  PD-L1 ECD v154
FTVTVPKDLYVVEYGSNMTIECKFPVEKQLDLAALIVYWEMEDKDIIQFAHGEEDLKVQHSSYRQRARLLKDQLSLGNAALQITDVKLQDAGVYRCMISYGGADYKRITVKVNAPYNKINQRILVVDPVTSEHELTCQAEGYPKAEVVWTSSDHQVLSGKTTTTNSKREEKLFNVTSTLRINTTTNEIFYCTFRGLDPEEDHTAELVIPELPLAHPPNERT

SEQ ID NO: 1817 - protein, 221 aa, Artificial Sequence
  PD-L1 ECD v155
FTVTVPKDLYVVEYGSNMTIECKFPVEKQLDLAALIVYWEKEGEDIIQFVHGEEDLKVQHSSYRQRARLLKDQLSLGNAALQITDVKLQDAGVYRCMISYGGADYKRITVKVNAPYNKINQRILVVDPVTSEHELTCQAEGYPKAEVIWTSSDHQVLSGKTTTTNSKREEKLFNVTSTLRINTTTNEIFYCTFRGLDPEEDHTAELVIPELPLAHPPNERT

SEQ ID NO: 1818 - protein, 221 aa, Artificial Sequence
  PD-L1 ECD v156
FTVTVPKDLYVVEYGSNMTIECKFPVEKQLDLAALIVYWEMEDKDIIQFAHGEEDLKVQHSSYRQRARLLKDQLSLGNAALQITDVKLQDAGVYRCMISYGGADYKRITVKVNAPYNKINQRISVVDPVTSEHELTCQAEGYPEAEVIWTSSDHQVLSGKTTTTNSKREEKLFNVTSTPRINTTTNEIFYCTFRGLDPEENHTAELVIPELPLAHPPNERT

SEQ ID NO: 1819 - protein, 220 aa, Artificial Sequence
  PD-L1 ECD v67
FTVTVPKDLYVVEYGSNMTIECKFPVEKQLDLAALIVYWEMEDKNIIQFVHGEEDLRVQHSSYRQRARLLKDQLSLGNAALQITDVKLQDAGVYRCMIGYGGADYKRITVKVNAPYNKINQRILVVDPVTSEHELTCQAEGYPKAEVIWTSSDHQVLSGKTTTTNSKREEKLFNVTSTLRINTTTNEIFYCTFRRLDPEENHTAELVIPELPLAHPPNER

SEQ ID NO: 1820 - protein, 220 aa, Artificial Sequence
  PD-L1 ECD v68
FTVTVPKDLYVVEYGSNMTIECKFPVEKQLDLAALIVYWEMEDKNIIQFVHGEEDLRVQHSSYRQRARLLKDQLSLGNAALQITDVKLQDAGVYRCMIGYGGADYKRITVKVNAPYNKINQRILVVDPVTSEHELTCQAEGYPKAEVIWTSSDHQVLSGKTTTTNSKREEKLFNVTSTLRINTTTNEILYCTFRRLDPEENHTAELVIPELPLAHPPNER

SEQ ID NO: 1821 - protein, 220 aa, Artificial Sequence
  PD-L1 ECD v69
FTVTVPKDLYVVEYGSNVTIECKFPVEKQLDLAALIVYWEMEDKNIIQFVHGEEDLKVQHSSYRQRARLLKDQLSLGNAALQITDVKLQDAGVYRCLISYGGADYKRITVKVNAPYNKINQRILVVDPVTSEHELTCQAEGYPKAEVIWTSSDHQVLSGKTTTTNSKREEKLFNVTSTLRINTTTNEIFYCTSRGLDPEKNQTAELVIPELPLAHPPNER

SEQ ID NO: 1822 - protein, 220 aa, Artificial Sequence
  PD-L1 ECD v70
FTVTVPKDLYVVEYGSNMTIECKFPVEKQLDLAALSVYWEKEDKNIIQFVHGEEDLKVQHSSYRQRARLLKDQLSLGNAALQITDVKLQDAGVYRCLISYGGADYKRITVKVNAPYNKINQRILVVDPVTSEHELTCQAEGYPQAEVIWTSSDHQVLSGKTTTTNSKREEKLFNVTSTLRINTTTNEIFYCTFRGLDPEKNQTAEFVIPELPLAHPPNER

SEQ ID NO: 1823 - protein, 220 aa, Artificial Sequence
  PD-L1 ECD v72
FTVTVPKDLYVVEYGSNVTIECKFPVEKQLDLAALIVYWEMEDKNIIQFVHGEEDLKVQHSSYRQRARLLKDQLSLGNAALQITDVKLQDAGVYRCMLSYGGADYKRITVKVNAPYNKINQRISVVDPVTSEHELTCQAEGYPKAEVIWTSSDHQVLSGKTTTTNSKREEKLFNVTSTLRINTTTNEIFYCTFRRLDTEENHTAEFVIPELPLAHPPNER

SEQ ID NO: 1824 - protein, 220 aa, Artificial Sequence
  PD-L1 ECD v73
FTVTVPKDLYVVEYGSNMTIECKFPVEKQLDLAALIVYWEMEDKNIIQFVHGEEDLKVQHSSYRQRARLLKDQLSLGNAALQITDVKLQDAGVYRCMIGYGGADYKRITVKVNAPYSKINQRILVVDPVTSEHELTCQAEGYPKAEVVWTSSDHQVLSGKTTTTNSKREERLFNVTSTLSINTTTNEIFYCTFRRLDPEENHTAELVIPELPLAHPPNER

SEQ ID NO: 1825 - protein, 220 aa, Artificial Sequence
  PD-L1 ECD v74
FTVTVPKDLYVVEYGSNMTIECKFPVEKQLDLAALTVYWEMEDKNIIQFVHGEEDLKVQHSSYRQRARLLKDQLSLGNAALQITDVKLQDAGVYRCLISYGGVDYKRITVKVNAPYNKINQRILVVDPVTSEHELTCQAEGYPKAEVIWTSSDHHVLSGKTTTTNSKREEKLFNVTSTLRINTTTNEIFYCTFRRLDPEENHTAELVIPELPLAHPPNER

SEQ ID NO: 1826 - protein, 220 aa, Artificial Sequence
  PD-L1 ECD v75
FTVTVPKDLYVVEYGSNMTIECKFPVEIQLDLAALIVYWEMEDKNIIQFVHGEEDLKVQHSSYRQRARLLKDQLSLGNAALQITDVKLQDAGVYRCMIGYGGADYKRITVKVNAPYNKINQRILVVDPVTSEHELTCQAEGYPKAEVIWTSSDHQVLSGKTTTTNSKREEKLFNVTSTLRINTTTNEIFYCTFRRLDPEENHTAELVIPELPLAHPPNER

SEQ ID NO: 1827 - protein, 220 aa, Artificial Sequence
  PD-L1 ECD v76
FTVTVPKDLYVVEYGSNMTIECKFPVEKQLDLAALIVYWEMEDKNIIQFVHGEEDLKVQHSSYRQRARLLKDQLSLGNAALQITDVKLQDAGVYRCMISYGGADYKRITVKVNAPYNKINQRILVVDPVTSEHELTCQAEGYPKAEVIWTSSDHQVLSGKTTTTNSKREEKLFNVTSTLRINTTTNEIFYCTFRSLDPEENHTAELVIPELPLAHPPNER

SEQ ID NO: 1828 - protein, 220 aa, Artificial Sequence
  PD-L1 ECD v77
FTVTVPKDLYVVEYGSNMTIECKFPVEKQLDLAALIVYWEMEDKNIIQFVHGEEDLKVQHSSYRQRARLLKDQLSLGNTALQITDVKLQDAGVYRCMIGYGGADYKRITVKVNAPYNKINQRILVVDPVTSEHELTCQAEGYPKAEVIWTSSDHQVLSGKTTTTNSKREEKLFNVTSTLRINTTANEIFYCTFRGLDPEKNQTAEFVIPELPLAHPPNER

SEQ ID NO: 1829 - protein, 220 aa, Artificial Sequence
  PD-L1 ECD v78
FTVTVPKDLYVVEYGSNMTIECKFPVEKQLDLAALIVYWEMEDKNIIQFVHGEEDLRVQHSSYRQRARLLKDQLSLGNAALQITDVKLQDAGVYRCMIGYGGADYKRITVKVNAPYNKINQRISVVDPVTSEHELTCQAEGYPQAEVIWTSSDHQVLSGKTTTTNSKREEKLFNVTSTLRINTTTNEIFYCTFRRLDPEENHTAELVIPELPLAHPPNER

SEQ ID NO: 1830 - protein, 220 aa, Artificial Sequence
  PD-L1 ECD v79
FTVTVPKDLYVVEYGSNMTIECKFPVEKQLDLAALIVYWEMEDKNIIQFVHGEEDLRVQHSSYRQRARLLKDQLSLGNAALQITDVKLQDAGVYRCMIGYGGADYKRITVKVNAPYNKINQRILVVDPVTSEHELTCQAEGYPKAEVIWTSSDHQVLSGKTTTTNSKREEKLFNVTSTLRINTTTNEIFYCTFRGLDPEENHTAELVIPELPLAHPPNER

SEQ ID NO: 1831 - protein, 220 aa, Artificial Sequence
  PD-L1 ECD v80
FTVTVPKDLYVVEYGSNMTIECKFPVEKQLDLAALIVYWEMEDKNIIQFVHGEEVLKVQHSSYRQRARLLKDQLSLGNAALQITDVKLQDAGVYRCLIGYGGADYKRITVKVNAPYNKINQRILVVDPVTSEHELTCQAEGYPKAEVIWTSSDHQVLSGKTTTTNSKREEKLFNVTSTLRINTTTNEIFYCTFRRLDPEENHTAELVIPELPLAHPPNER

SEQ ID NO: 1832 - protein, 220 aa, Artificial Sequence
  PD-L1 ECD v81
FTVTVPKDLYVVEYGSNMTIECKFPVGKQLDLAALTVYWEMEDKNIIQFVHGEENLKVQHSSYRQRARLLKDQLSLGNAALQITDVKLQDAGVYRCLISYGGADYKRITVEVNAPYNKINQRILVVDPVTSEHELTCQAEGYPKAEVIWTSSDHQVLSGKTTTTNSKREEKLFNVTSTLRINTTTNEIFYCTFRRLDPEENHTAELVIPELPLAHPPNER

SEQ ID NO: 1833 - protein, 220 aa, Artificial Sequence
  PD-L1 ECD v82
FTVTVPKDLYVVEYGSNMTIECKFPVEKQLDLAALIVYWEMEDKNIIQFVHGEGDLKVQHSSYRQRARLLKDQLSLGNAALQITDVKLQDAGVYRCLIGYGGADYKRITVKVNAPYNKINQRILVVDPVTSEHELTCQAEGYPKAEVIWTSSDHQVLSGKTTTTNSKREEKLFNVTSTLRINTTTNEIFYCTFRRLDPEENHTAELVIPELPLAHPPNER

SEQ ID NO: 1834 - protein, 220 aa, Artificial Sequence
  PD-L1 ECD v83
FTVTVPKDLYVVEYASNMTIECKFPVEKQLDLAALTVYWEMEDKNIIQFVHGEEDLKVQHSSYRQRARLLKDQLSLGNAALQITDVKLQDAGVYRCLISYGGADYKRITVEVNAPYNKINQRILVVDPVTSEHELTCQAEGYPKAEVIWTSSDHQVLSGKTTTTNSKREEKLFNVTSTLRINTTTNEIFYCTFRRLDPEENQTAELVIPELPLAHPPNER

SEQ ID NO: 1835 - protein, 220 aa, Artificial Sequence
  PD-L1 ECD v84
FTVTVPKDLYVVEYASNMTIECKFPVEKQLDLAALTVYWEMEDKNIIQFVHGEEDLKVQHSSYRQRARLLKDQLSLGNAALQITDVKLQDAGVYRCMISYGGADYKRITVKVNAPYNKINQRILVVDPDTSEHELTCQAEGYPKAEVIWTSSDHQVLSGKTTTTNSKREEKLFNVTSTLRINTTTNEIFYCTFRRLDPEENHTAELVIPELPLAHPPNER

SEQ ID NO: 1836 - protein, 220 aa, Artificial Sequence
  PD-L1 ECD v85
FTVTVPKDLYVVEYASNMTIECKFPVEKQLDLAALTVYWEMEDKNIIQFVHGEEDLKVQHSSYRQRARLLKDQLSLGNAALQITDVKLQDAGVYRCMISYGGADYKRITVKVNAPYNKINQRILVVDPDTSEHELTCQAEGYPKAEVIWTSSDHQVLSGKTTTTNSKREEKLFNVTSTLRINTTTNEIFYCTFRGLDPEENHTAELVIPELPLAHPPNER

SEQ ID NO: 1837 - protein, 220 aa, Artificial Sequence
  PD-L1 ECD v86
FTVTVPKDLYVVEYASNMTIECKFPVEKQLDLAALIVYWEMEDKNIIQFVHGEEDLKVQHSSYRQRARLLKDQLSLGNAALQITDVKLQDAGVYRCMISYGGADYKRITVKVNAPYNKINQRILVVDPDTSEHELTCQAEGYPKAEVIWTSSDHQVLSGKTTTTNSKREEKLFNVTSTLRINTTTNEIFYCTFRRLDPEENHTAELVIPELPLAHPPNER

SEQ ID NO: 1838 - protein, 220 aa, Artificial Sequence
  PD-L1 ECD v87
FTVTVPKDLYVVEYGSNMTIECKFPVEKQLDLAALSVYWEMEDKNIIQFVHGEEDLKVQHSSYRQRARLLKDQLSLGNAALQITDVKLQDAGVYRCLISYGGADYKRITVKVNAPYNKINQRILVVDPVTSEHELTCQAEGYPKAEVIWTSSDHQVLSGKTTTTNSKREEKLFNVTSTLRINTTTNEIFYCTFRRLDPEENHTAELVIPELPLAHPPNER

SEQ ID NO: 1839 - protein, 220 aa, Artificial Sequence
  PD-L1 ECD v88
FTVTVPKDLYVVEYGSNMTIECKFPVEKQLDLAALTVYWEMEDKNIIQFVHGEENLKVQHSSYRQRARLLKDQLSLGNAALQITDVKLQDAGVYRCLISYGGADYKRITVEVNAPYNKINQRILVVDPVTSEHELTCQAEGYPKAEVIWTSSDHQVLSGKTTTTNSKREEKLFNVTSTLRINTTTNEIFYCTFRRLDPEENHTTELVIPELPLAHPPNER

SEQ ID NO: 1840 - protein, 220 aa, Artificial Sequence
  PD-L1 ECD v89
FTVTVPKDLYVVEYGSNMTIECKFPVEKQLDLAALTVYWEMEDKNIIQFVHGEENLKVQHSSYRQRARLLKDQLSLGNAALQITDVKLQDAGVYRCLISYGGADYKRITVEVNAPYNKINQRILVVDPATSEHELTCQAEGYPKAEVIWTSSDHQVLSGKTTTTNSKREEKLLNVTSTLRINTTTNEIFYCTFRRLDPEENHTAELVIPELPLAHPPNER

SEQ ID NO: 1841 - protein, 220 aa, Artificial Sequence
  PD-L1 ECD v90
FTVTVPKDLYVVEYGSNMTIECKFPVEKQLDLAALTVYWEMEDKNIIQFVHGEESLKVQHSSYRQRARLLKDQLSLGNAALQITDVKLQDAGVYRCLISYGGADYKRITVEVNAPYNKINQRILVVDPVTSEHELTCQAEGYPKAEVVWTSSDHQVLSGKTTTTNSKREEKLFNVTSTLSINTTTNEIFYCTFRRLDPEENHTAELVIPELPLAHPPNER

SEQ ID NO: 1842 - protein, 220 aa, Artificial Sequence
  PD-L1 ECD v91
FTVTVPKDLYVVEYGSNMTIECKFPVEKQLDLAALTVYWEMEDKNIIQFVHREEDLKVQHSSYRQRARLLKDQLSLGNAALQITDVKLQDAGVYRCLISYGGADYKRITVKANAPYNKINQRILVVDPVTSEHELTCQAEGYPEAEVIWTSSDHQVLSGKTTTTNSKREEKLFNATSTLRINTTTNEIFYCTFRRLDTEENHTAELVIPELPLAHPPNER

SEQ ID NO: 1843 - protein, 220 aa, Artificial Sequence
  PD-L1 ECD v92
FTVTVPKDLYVVEYGSNMTIECKFPVEKQLDLAALTVYWEMEDKNVIQFVHGEEGLKVQHSSYRQRARLLKDQLSLGNAALQITDVKLQDAGVYRCLISYGGADYERITVKVNAPYNKINQRILVVDPVTSEHELTCQAEGYPEAEVIWTSSDHQVLSGKTTTTNSKREEKLFNVTSTLRINTTANEIFYCTFRGLDPEENHTAELVIPELPLAHPPNER

SEQ ID NO: 1844 - protein, 220 aa, Artificial Sequence
  PD-L1 ECD v93
FTVTVPKDLYVVEYGSNMTIECKFPVEKQLDLAALTVYWEMEDKNIIQFVHGEEDLKVQHSSYRQRARLLKDQLSLGNAALQTTDVKLQDAGVYRCLISYGGADYKRITVKVNAPYNKINQRILVVDPVTSEHELTCQAEGYPEAEVIWTSSDHQVLSGKTTTTNSKREEKLFNVTSTLRINTTTNEIFYCTFRRLDTEENHTAELVIPELPLAHPPNER

SEQ ID NO: 1845 - protein, 220 aa, Artificial Sequence
  PD-L1 ECD v94
FTVTVPKDLYVVEYGSNMTIECKFPVEKQLDLAALTVYWEMEDKNIIQFVHGEEDLKVQHSSYRQRARLLKDQLSLGNAALQITDVKLQDAGVYRCLISYGGADYKRITVEVNAPYNKINQRILVVDPVTSEHELTCQAEGYPKAEVIWTSSDHQVLSGKTTTTNSKREEKLFNVTSTLRINTTTNEIFYCTFRRLDPEENHTAELVIPELPLAHPPNER

SEQ ID NO: 1846 - protein, 220 aa, Artificial Sequence
  PD-L1 ECD v95
FTVTVPKDLYVVEYGSNMTIECKFPVEKQLDLAALTVYWEMEDKNIIQFVHGEEDLKVQHSSYRQRARLLKDQLSLGNAALQITDVKLQDAGVYRCLISYGGADYKRITVKVNAPYNKINQRILVVDPVTSEHELTCQAEGYPEAEVIWTSSDHQVLSGKTTTTNSKREEKLFNVTSTLRINTTTNEIFYCTFRRLDTEENHTAELVIPELPLAHPPNER

SEQ ID NO: 1847 - protein, 220 aa, Artificial Sequence
  PD-L1 ECD v96
FTVTVPKDLYVVEYGSNMTIECKFPVEKQLDLAALTVYWEMEDKNIIQFVHGEEDLKVQHSSYRQRARLLKDQLSLGNAALQITDVKLQDAGVYRCLISYGGADYKRITVKVNAPYNKINQRILVVDPVTSEHELTCQAEGYPKAEVIWTSSDHHVLSGKTTTTNSKREEKLFNVTSTLRINTTTNEIFYCTSRRLDPEEYHTAELVIPELPLAHPPNER

SEQ ID NO: 1848 - protein, 220 aa, Artificial Sequence
  PD-L1 ECD v97
FTVTVPKDLYVVEYGSNMTIECKFPVEKQLDLAALTVYWEMEDKNIIQFVHGEEDLKVQHSSYRQRARLLKDQLSLGNAALQITDVKLQDAGVYRCLISYGGADYKRITVKVNAPYNKINQRILVVDPDTSEHELTCQAEGYPKAEVIWTSSDHQVLSGKTTTTNSKREEKLFNVTSTLRINTTTNEIFYCTFRRLDPEENHTAELVIPELPLAHPPNER

SEQ ID NO: 1849 - protein, 220 aa, Artificial Sequence
  PD-L1 ECD v98
FTVTVPKDLYVVEYGSNMTIECKFPVEKQLDLAAPSVYWEMEDKNIIQFVHGEEDLKVQHSSYRQRARLLKDQLSLGNAALQITDVKLQDAGVYRCLISYGGADYKRITVEVNAPYNKINQRILVVDPVTSEHELTCQAEGYPKAEVIWTSSDHQVLSGKTTTTNSKREEKLFNVTSTLRINTTTNEIFYCTFRRLDPEENHTAELVIPELPLAHPPNER

SEQ ID NO: 1850 - protein, 220 aa, Artificial Sequence
  PD-L1 ECD v99
FTVTVPKDLYVVEYGSNITIECKFPVEKQLDLAALTVYWEMEDKNIIQFVHGGEDLKVQHSSYRQRARLLKDQLSLGNAALQITDVKLQDAGVYRCLISYGGADYKRITVKVNAPYNKINQRILVVDPVTSEHELTCQAEGYPEAEVIWTSSDHQVLSGKTTTTNSKREEKLFNVTSTLRINTTTNEIFYCTFRRLDPGENHTAELAIPELPLAHPPNER

SEQ ID NO: 1851 - protein, 220 aa, Artificial Sequence
  PD-L1 ECD v100
FTVTVPKDLYVVEYGSNTTIECKFPVEKQLDLAALTVYWEMEDKNIIQFVHGEENLKVQHSSYRQRARLLKDQLSLGNAALQITDVKLQDAGVYRCLISYGGADYKRITVEVNAPYNKINQRILVVDPVTSEHELTCQAEGYPKAEVIWTSSDHQVLSGKTTTTNSKREEKLFNVTSTLRINTTTNEIFYCTFRRLDPEENHTAELVIPELPLAHPPNER

SEQ ID NO: 1852 - protein, 220 aa, Artificial Sequence
  PD-L1 ECD v101
FTVTVPKDLYVVEYGSNVTIECKFPVEKQLDLAALIVYWEMEDKNIIQFVHGEEDLKVQHSSYRQRARLLKDQLSLGNAALQITDVKLQDAGVYRCLISYGGADYKRITVKVNAPYNKINQRILVVDPVTSEHELTCQAEGYPKAEVIWTSSDHQVLSGKTTTTNSKREEKLFNVNSTLRINTTTNEIFYCTFRGLDPEENHTAELVIPELPLAHPPNER

SEQ ID NO: 1853 - protein, 220 aa, Artificial Sequence
  PD-L1 ECD v102
FTVTVPKDLYVVEYGSNMTIECKFPVEKQLDLAALIVYWEMEDKNIIQFVHGEEDLKVQHSSYRQRARLLKDQLSLGNAALQITDVKLQDAGVYRCLIGYGGADYKRITVKVNAPYNKINQRILVVDPVTSEHELTCQAEGYPKAEVIWTSSDHQVLSGKTTTTNSKREEKLFNVTSTLRINTTTNEIFYCTFRRLDPEENHTAELVIPELPLAHPPNER

SEQ ID NO: 1854 - protein, 220 aa, Artificial Sequence
  PD-L1 ECD v103
FTVTVPKDLYVVEYGSDMTIECKFPVEKQLDLAALIVYWEMEDKNIIQFVHGEEDLKVQHSSYRQRARLLKDQLSLGNAALQITDVKLQDAGVYRCLIGYGGADYKRITVKVNAPYNKINQRILVVDPVTSEHELTCQAEGYPKAEVIWTSSDHQVLSGKTTTTNSKREEKLFNVTSTLRINTTTNEIFYCTFRRLDPEENHTAELVIPELPLAHPPNER

SEQ ID NO: 1855 - protein, 220 aa, Artificial Sequence
  PD-L1 ECD v104
FTVTVPKDLYVVEYGSNMTIECKFPVEKQLDLAALIVYWEMEDKNIIQFVHGEEDLKVQHSSYRQRARLLKDQLSLGNAALQITDVKLQDAGVYRCMIGYGGADYKRITVKVNAPYNKINQRILVVDPVTSEHELTCQAEGYPKAEVIWTSSDHQVLSGKTTTTNSKREEKLFNVTSTLRINTTANEIFYCTFRGLDTEENHTAELVIPELPLAHPPNER

SEQ ID NO: 1856 - protein, 220 aa, Artificial Sequence
  PD-L1 ECD v105
FTVTVPKDLYVVEYGSNMTIECKFPVEKQLDLAALIVYWEMEDKNIIQFVHGEEDLKVQHSSYRQRARLLKDQLSLGNAALQITDVKLQDAGVYRCMISYGGADYKRITVKVNAPYNKINQRILVVDPDTSEHELTCQAEGYPKAEVIWTSSDHQVLSGKTTTTNSKREEKLFNVTSTLRINTTTNEIFYCTFRRLDPEENQTAELVIPELPLAHPPNER

SEQ ID NO: 1857 - protein, 220 aa, Artificial Sequence
  PD-L1 ECD v106
FTVTVPKDLYVVEYGSNMTIECKFPVEKQLDLAALIVYWEMEDKNIIQFVHGEEDLKVQHSSYRQRARLLKDQLSLGNAALQITDVKLQDAGVYRCMISYGGADYKRITVKVNAPYNKINQRILVVDPDTSEHELTCQAEGYPKAEVIWTSSDHQVLSGKTTTTNSKREEKLFNVTSTLRINTTTNEIFYCTFRRLDTEENHTAELVIPELPLAHPPNER

SEQ ID NO: 1858 - protein, 220 aa, Artificial Sequence
  PD-L1 ECD v107
FTVTVPKDLYVVEYGSNMTIECKFPVEKQLDLAALIVYWEMEDKNIIQFVHGEEDLKVQHSSYRQRARLLKDQLSLGNAALQITDVKLQDAGVYRCMISYGGADYKRITVKVNAPYNKINQRILVVDPDTSEHELTCQAEGYPKAEVIWASSDHQVLSGKTTTTNSKREEKLFNVTSTLRINTTTNEIFYCTFRRLDPEENHTAELVIPELPLAHPPNER

SEQ ID NO: 1859 - protein, 220 aa, Artificial Sequence
  PD-L1 ECD v108
FTVTVPKDLYVVEYGSNMTIECKFPVEKQLDLAALIVYWEMEDKNIIQFVHGEEDLKVQHSSYRQRARLLKDQLSLGNAALQITDVKLQDAGEYRCMISYGGADYKRITVKVNAPYNKINQRILVVDPDTSEHELTCQAEGYPKAEVIWTSSDHQVLSGKTTTTNSKREEKLFNVTSTLRINTTTNEIFYCTFRRLDPEENHTAELVIPELPLAHPPNER

SEQ ID NO: 1860 - protein, 220 aa, Artificial Sequence
  PD-L1 ECD v109
FTVTVPKDLFVVEYGSNVTIECKFPVEKQLDLAALIVYWEMEDKNIIQFVHGEEDLKVQHSSYRQRARLLKDQLSLGNAALQITDVKLQDAGVYRCMIGYGGADYKRITVKVNAPYNKINQRILVVDPVTSEHELTCRAEGYPKAEVIWTSSDHQVLSGKTTTTNSKREEKLFNVTSTLRINTTTNEIFYCTFRRLDPEENHAAELVIPELPLAHPPNER

SEQ ID NO: 1861 - protein, 220 aa, Artificial Sequence
  PD-L1 ECD v110
FTVTVPKDLYVVEYGSNMTIECKFPVEKQLDLAALIVYWEMEDKDIIQFVHGEEDLKVQHSSYRQRARLLKDQLSLGNAALQITDVKLQDAGVYRCMISYGGADYKRITVKVNAPYNKINQRILVVDPVTSEHELTCQAEGYPKAEVIWTSSDHQVLSGKTTTTNSKREEKLFNVTSTLRINTTTNEIFYCTFRRLDPEENHTAELVIPELPLAHPPNER

SEQ ID NO: 1862 - protein, 220 aa, Artificial Sequence
  PD-L1 ECD v111
FTVTVPKDLYVVEYGSNMTIECKFPVEKQLDLAALIVYWEMEDKNIIQFVHGEEDLKVQHSSYRQRARLLKDQLSLGNAALQITDVKLQDAGVYRCMISYGGADYKRITVKVNAPYNKINQRILVVDPVTSEHELTCQAEGYPKAEVIWTSSDHQVLSGMTTTTNSKREEKLFNVTSTLRINTTTNEIFYCTFRGLDPEENHTAELVIPELPLAHPPNER

SEQ ID NO: 1863 - protein, 220 aa, Artificial Sequence
  PD-L1 ECD v112
FTVTVPKDLYVVEYGSNMTIECKFPVEKQLDLAALIVYWEMEDKDIIQFVHGEEDLKVQHSSYRQRARLLKDQLSLGNAALQITDVKLQDAGVYRCMISYGGADYKRITVKVNAPYNKINQRILVVDPVTSEHELTCQAEGYPEAEVIWTSSDHQVLSGKTTTTNSKREEKLFNVTSTLRINTTTNEIFYCTFRRLDPEENHTAELVIPELPLAHPPNER

SEQ ID NO: 1864 - protein, 220 aa, Artificial Sequence
  PD-L1 ECD v113
FTVTVPKDLYVVEYGSNMTIECKFPVEKQLDLAALIVYWEMEDKDIIQFVHGEEDLKVQHSSYRQRARLLKDQLSLGNAALQITDVKLQDAGVYRCMISYGGADYKRITVKVNAPYNKINQRILVVDPVTSEHELTCQAEGYPKAEVIWTSSDHQVLSGKTTTTNSKREEKLFNVTSTLRINTTTNEIFYCTFRRLDSEENHTAELVIPELPLAHPPNER

SEQ ID NO: 1865 - protein, 220 aa, Artificial Sequence
  PD-L1 ECD v114
FTVTVPKDLYVVEYGSNMTIECKFPVEKQLDLAALIVYWEMEDKDIIQFVHGEEDLKVQHSSYRQRARLLKDQLSLGNAALQITDVKLQDAGVYRCMISYGGADYKRITVKVNAPYNKINQRILVVDPVTSEHELTCQAEGYPKAEVIWTSSDHQVLSGKTTTTNSKREEKLFNVTSTLRINTTTNEIFYCTFRRLDTEENHTAELVIPELPLAHPPNER

SEQ ID NO: 1866 - protein, 220 aa, Artificial Sequence
  PD-L1 ECD v115
FTVTVPKDLYVVEYGSNMTIECKFPVEKQLDLAALIVYWEMEDKDIIQFVHGEEDLKVQHSSYRQRARLLKDQLSLGNAALQITDVKLQDAGVYRCMISYGGADYKRITVKVNAPYNKINQRILVVDPVTSEHELTCQAEGYPKAEVIWTSSDHQVLSGKTTTTNSKREEKLFNVTSTLRINTTTNEIFYCTFRGLDPEENHTAELVIPELPLAHPPNER

SEQ ID NO: 1867 - protein, 220 aa, Artificial Sequence
  PD-L1 ECD v116
FTVTVPKDLYVVEYGSNMTIECKFPVEKQLDLAALIVYWEMEDKDIIQFVHGEEDLKVQHSSYRQRARLLKDQLSLGNAALQITDVKLQDAGVYRCMISYGGADYKRITVKVNAPYNKINQRILVVDPVTSEHELTCQAEGYPKAEVIWTSSDHQVLSGKTTTTNSKREEKLFNVTSTLRINTTTNEIFYCTFRSLDPEENHTAELVIPELPLAHPPNER

SEQ ID NO: 1868 - protein, 220 aa, Artificial Sequence
  PD-L1 ECD v117
FTVTVPKDLYVVEYGSNMTIECKFPVEKQLDLAALIVYWEMEDKDIIQFVHGEEDLKVQHSSYRQRARLLKDQLSLGNAALQITDVKLQDAGVYRCMISYGGADYKRITVKVNAPYNKINQRILVVDPVTFEHELTCQAEGYPKAEVIWTSSDHQVLSGKTTTTNSKREEKLFNVTSTLRINTTTNEIFYCTFRRLDPEENHTAELVIPELPLAHPPNER

SEQ ID NO: 1869 - protein, 220 aa, Artificial Sequence
  PD-L1 ECD v118
FTVTVPKDLYVVEYGSNMTIECKFPVEKQLDLAALIVYWEMEDKDIIQFVHGEEDLKDQHSSYRQRARLLKDQLSLGNAALQITDVKLQDAGVYRCMISYGGADYKRITVKVNAPYNKINQRILVVDPVTSEHELTCQAEGYPKAEVIWTSSDHQVLSGKTTTTNSKREEKLFNVTSTLRINTTTNEIFYCTFRRLDPEENHTAELVIPELPLAHPPNER

SEQ ID NO: 1870 - protein, 220 aa, Artificial Sequence
  PD-L1 ECD v119
FTVTVPKDLYVVEYGSNMTIECKFPVEKQLDLAALIVYWEMEDKNIIQFVHGEEDLKVQHSSYRQRARLLKDQLSLGNAALQITDVKLQDAGVYRCMISYGGADYKRITVKVNAPYNKINQRILVVDPDTSEHELTCQAEGYPKAEVIWTSSDHQVLSGKTTTTNSKREEKLFNVTSTLRINTTTNEIFYCTFRSLDPEENHTAELVIPELPLAHPPNER

SEQ ID NO: 1871 - protein, 220 aa, Artificial Sequence
  PD-L1 ECD v120
FTVTVPKDLYVVEYGSNMTIECKFPVEKQLDLAALIVYWEMEDKNIIQFVHGEEDLKVQHSSYRQRARLLKDQLSLGNAALQITDVKLQDAGVYRCMTSYGGADYKRITVKVNAPYNKINQRILVVDPVTSEHELTCQAEGYPKAEVIWTSSDHQVLSGKTTTTNSKREEKLYNVTSTLRINTTTNEIFYCTFRRSDPEENHTAELVIPELPLAHPPNER

SEQ ID NO: 1872 - protein, 220 aa, Artificial Sequence
  PD-L1 ECD v121
FTVTVPKDLYVVEYGSNMTIECKFPVEKQLDLAALIVYWEMEDKDIIQFVHGEEDLKVQHSSYRQRARLLKDQLSLGNAALQITDVKLQDAGVYRCMISYGGADYKRITVKVNAPYNKINQRILVVDPVTSEHGLTCQAEGYPKAEVIWTSSDHQVLSGKTTTTNSKREEKLFNVTSTLRINTTTNEIFYCTFRRLDPEENHTAELVIPELPPAHPPNER

SEQ ID NO: 1873 - protein, 220 aa, Artificial Sequence
  PD-L1 ECD v122
FTVTVPKDLYVVEYGSNMTIECKFPVEKQLDLAALIVYWEMEDKDIIQFVHGEEDLKVQHSSYRQRARLLKDQLSLGNAALQITDVKLQDAGVYRCMISYGGADYKRITVKVNAPYNKINQRILVVDPVTSEHELTCQAEGYPKAEVIWTSSDHQVLSGKTTTTNSKREEKLINVTCTLRINTTTNEIFYCTFRRLDPEENHTAELVIPELPLAHPPNER

SEQ ID NO: 1874 - protein, 220 aa, Artificial Sequence
  PD-L1 ECD v123
FTVTVPKDLYVVEYGSNMTIECKFPVEKQLDLAALIVYWEMEDKDIIQFVHGEEDLKVQHSSYRQRARLLKDQLSLGNAALQITDVKLQDAGVYRCMISYGGADYKRITVKVNAPYNKINQRILVVDPVTSEHELTCQAEGYPKAEVVWTSSDHQVLSGKTTTTNSKREEKLFNVTSTLRINTTTNEIFYCTFRGLDPEENHTAELVIPELPLAHPPNER

SEQ ID NO: 1875 - protein, 220 aa, Artificial Sequence
  PD-L1 ECD v124
FTVTVPKDLYVVEYGSNMTIECKFPVEKQLDLAALIVYWEMEDKDIIQFVHGEEDLKVQHSSYRQRARLLKDQLSLGNAALQITDVKLQDAGVYRCMISYGGADYKRITVTVNAPYNKINQRILVVDPVTSEHELTCQAEGYPKAEVIWTSSDHQVLSGKTTTTNSKREEKLFNVTSTLRINTTTNEIFYCTFRGLDPEENHTAELVIPELPLAHPPNER

SEQ ID NO: 1876 - protein, 220 aa, Artificial Sequence
  PD-L1 ECD v125
FTVTVPKDLYVVEYGSNMTIECKFPVEKQLDLAALIVYWEMEDKDIIQFVHGEEDLKVQHSSYRQRARLLKDQLSLGNAALQITDVKLQDAGVYRCMISYGGADYKRITVKVYAPYNKINQRILVVDPVTSEHELTCQAEGYPKAEVIWTSSDHQVLSGKTTTTNSKREEKLFNVTSTLRINTTTNEIFYCTFRSLDPEENHTAELVIPELPLAHPPNER

SEQ ID NO: 1877 - protein, 220 aa, Artificial Sequence
  PD-L1 ECD v126
FTVTVPKDLYVVEYGSNMTIECKFPVEKQLDLAALIVYWEMEDKDIIQFVHGEEDLKVQHSSYRQRARLLKDQLSLGNAALQITDVKLQDAGVYRCMISYGGADYKRITVKVNAPYNKINQRILVVDPVTSEHELTCQAEGYPKAEVIWTSSDHQVLSGKTTTTYSKREGKLFNVTSTLRINTTTNEIFYCTFRRLDPEENHTAELVIPELPLAHPPNER

SEQ ID NO: 1878 - protein, 220 aa, Artificial Sequence
  PD-L1 ECD v127
FTVTVPKDLYVVEYGSNMTIECKFPVEKQLDLAALIVYWEMEDKDIIQFVHGEEDLKVQHSSYRQRARLLKDQLSLGNAALQITDVKLRDAGVYRCMVSYGGADYKRITVKVNAPYNKINQRILVVDPVTSEHELTCQAEGYPKAEVIWTSSDHQVLSGKTTTTNSKREEKLFNVTSTLRINTTTNEIFYCTFRRLDPEENHTAELVIPELPLAHPPNER

SEQ ID NO: 1879 - protein, 220 aa, Artificial Sequence
  PD-L1 ECD v128
FTVTVPKDLYVVEYGSNMTIECKFPVEKQLDLAALIVYWEMEDKDIIQFVHGEEDLKVQHSSYRQRARLLKDQLSLGNAALQITDVKLQDAGVYRCMISYGGADYKRITVKVNAPYNKINQRILVVDPVTFEHELTCQAEGYPKAEVIWTSSDHQVLSGKTTTTNSKREEKLFNVTSTLRINTTTNEIFYCTFRRLDSEENHTAELVIPELPLAHPPNER

SEQ ID NO: 1880 - protein, 220 aa, Artificial Sequence
  PD-L1 ECD v129
FTVTVPKDLYVVEYGSNMTIECKFPVEKQLDLAALIVYWEMEDKDIIQFVHGEEDLKVQHSSYRQRARLLKDQLPLGNAALQITDVKLQDAGVYRCMISYGGADYKRITVKVNAPYNKINQRILVVDPVTSEHELTCQAEGYPKAEVIWTSSDHQVLSGKTTTTNSKREEKLFNVTSTLRINTTTNEIFYCTFRRLDSEENHTAELVIPELPLAHPPNER

SEQ ID NO: 1881 - protein, 220 aa, Artificial Sequence
  PD-L1 ECD v131
FTVTVPKDLYVVEYGSNMTIECKFPVEKQLDLAALIVYWEMEDKDIIQFAHGEEDLKVQHSSYRQRARLLKDQLSLGNAALQITDVKLQDAGVYRCMISYGGADYKRITVKVNAPYNKINQRILVVDPVTSEHELTCQAEGYPKAEVIWTSSDHQVLSGKTTTTNSKREEKLFNVTSTLRINTTTNEIFYCTFRTLDPEENHTAELVIPELPLAHPPNER

SEQ ID NO: 1882 - protein, 220 aa, Artificial Sequence
  PD-L1 ECD v131
FTVTVPKDLYVVEYGSNMTIECKFPVDKQLDLAALIVYWEMEDKDIIQFVHGEEDLKVQHSSYRQRARLLKDQLSLGNAALQITDVKLQDAGVYRCMISYGGADYKRITVKVNAPYNKINQRILVVDPVTSEHELTCQAEGYPKAEVIWTSSDHQVLSGKTTTTNSKREEKLFNVTSTLRINATTNEVFYCTFRRLDPEENHTAELVIPELPLAHPPNER

SEQ ID NO: 1883 - protein, 220 aa, Artificial Sequence
  PD-L1 ECD v132
FTVTVPKDLYVVEYGSNMTIECKFPVEKQLDLAALIVYWEMEDKNIIQFVHGEEDLKVQHSSYRQRARLLKDQLSLGNAALQITDVKLQDAGVYRCMISYGGADYKRITVKVNAPYNKINQRILVVDPVTSEHELTCQAEGYPKAEVIWTSSDHQVLSGKTTTTNSKREEKLYNVTSTLRINITTNEIFYCTFRRSDPEENHAAELVIPELPLAHPPNER

SEQ ID NO: 1884 - protein, 220 aa, Artificial Sequence
  PD-L1 ECD v133
FTVTVPKDLYVVEYGSNMTIECNFPVEKQLDLAALIVYWEMEDKDIIQFVHGEEDLKVQHSSYRQRARLLKDQLPLGNAALQITDVKLQDAGVYRCMISYGGADYKRITVKVNAPYNKISQRILVVDPVTSEHELTCQAEGYPKAEVIWTSSDHQVLSGKTTTTNSKREEKLFNVTSTLRINTTTNEIFYCTFRRLDPEENHTAELVIPELPLAHPPNER

SEQ ID NO: 1885 - protein, 220 aa, Artificial Sequence
  PD-L1 ECD v134
FTVTVPKDLYVVEYGSNMTIECKFPVEKQLDLAALIVYWEMEDKDIIQFVHGEEDLKVQHSSYRQRARLLKDQLSLGNAALQITDVKLQDAGVYRCMISYGDADYKRITVKVNAPYNKINQRILVVDPVTSEHELTCQAEGYPKAEVIWTSSDHQVLSGKTTTTNSKREEKLFNVTSTLRINTTTNEIFYCTFWGLDPEENHTAELVIPELPLAHPPNER

SEQ ID NO: 1886 - protein, 220 aa, Artificial Sequence
  PD-L1 ECD v135
FTVTVPKDLYVVEYGSNMTIECKFPVEKQLDLAALIVYWEMEDKDIIQFVHVEEDLKVQHSSYRQRARLLKDQLSLGNAALQITDVKLQDAGVYRCMISYGGADYKRITVKVNAPYNKINLRILVVDPVTSEHELTCQAEGYPKAEVIWTSSDHQVLSGKTTTTNSKREEKLFNVTSTLRINTTTNEIFYCTFRRLDSEENHTAELVIPELPLAHPPNER

SEQ ID NO: 1887 - protein, 220 aa, Artificial Sequence
  PD-L1 ECD v136
FTVTVPKDLYVVEYGSNMTIECKFPVEKQLDLAALIVYWEMEDKDIIQFVHGEEDLKVQHSSYRQRARLLKDQLSLGNAALQITDVKLQDAGVYRCMISYGGADYKRITVKVNAPYNKINQRILVVDPVTSEHELTCQAEGYPKAEVVWTSSDHQVLSGKTTTTNSKREEKLFNVTSTLRINTTTNEIFYCTFRGLDPEEDHTAELVIPELPLAHPPNER

SEQ ID NO: 1888 - protein, 220 aa, Artificial Sequence
  PD-L1 ECD v137
FTVTVPKDLYVVEYGSNMTIECKFPVEKQLDLAALIVYWEMEDKDIIQFVHGEEDLKVQHSSYRQRARLLKDQLSLGNAALQITDVKLQDAGVYRCMISYGGADYKRITVTVNAPYNKINQRILVVDPVTSEHELTCQAEGYPKAEVIWTSSDHQVLSGKTTTTNSKREEKLFNVTSTLRINATTNEVFYCTFRRLDPEENHTAELVIPELPLAHPPNER

SEQ ID NO: 1889 - protein, 220 aa, Artificial Sequence
  PD-L1 ECD v138
FTVTVPKDLYVVEYGSNMTIECKFPVEKQLDLAALIVYWEMEDKDIIQFVHGEEDLKVQHSSYRQRARLLKDQLSLGNAALQITDVKLRDAGVYRCMISYGGADYKRITVKVNAPYNKINQRILVVDPVTSEHELTCQAEGYPKAEVIWTSSDHQVLSGKTTTTNSKREEKLFNVTSTLRINTTTNEISYCTFRRLDSEENHTAELVIPELPLAHPPNER

SEQ ID NO: 1890 - protein, 220 aa, Artificial Sequence
  PD-L1 ECD v139
FTVTVPKDLYVVEYGSNMTIECKFPVEKQLDLAALIVYWEMEDKDIIQFVHGEEDLKVQHSSYRQRARLLKDQLSLGNAALQITDVKLQDAGVYRCMIGYGGADYKRITVKVNAPYNKINQRILVVDPVTSEHELTRQAEGYPKAEVIWTSSDHQVLSGKTTTTNSKREEKLFNVTSTLRINTTTNEIFYCTFRRLDPEENHTAELAIPELPLAHPPNER

SEQ ID NO: 1891 - protein, 220 aa, Artificial Sequence
  PD-L1 ECD v140
FTVTVPKDLYVVEYGSNMTIECKFPVEKQLDLAALIVYWEMEDKDIIQFVHGEEDLKVQHSSYRQRARLLKDQLSLGNAALQITDVKLQDAGVYRCMISYGGADYKRITVKVNAPYNKINQRILVVDPVTSEHELTCQAEGYPKAEVIWTSSDHQVLSGKTTITNSRREEKLFNVTSTLRINTTTNEIFYCTFRGLDPEENHTAELVIPELPLAHPPNER

SEQ ID NO: 1892 - protein, 220 aa, Artificial Sequence
  PD-L1 ECD v141
FTVTVPKDLYVVEYGSNMTIECKFPVEKQLDLAALIVYWEMEDKDIIQFVHGEEDLKVQHSSYRQRARLLKDQLSLGNAALQITDVKLQDAGVYRCMISYGGADYKRITVKVNAPYNKINQRILVVDPVTSEHELTCQAEGYPKAEVIWTSSDHQVLSGKTTTTNSKREEKLFNVTSTLRINATTNEIFYCSFGRLDPEENHTAELVIPELPLAHPPNER

SEQ ID NO: 1893 - protein, 220 aa, Artificial Sequence
  PD-L1 ECD v142
FTVTVPKDLYVVEYGSNMTIECKFPVEKQLDLAALIVYWEMEDKDIIQFAHGEEDLKVQHSSYRQRARLLKDQLSLGNAALQITDVKLQDAGVYRCMISYGGADYKRITVKVNAPYNKTNQRILVVDPVTSEHELTCQAEGYPEAEVIWTSSDHQVLSGKTTTTNSKREEKLFNVTSTLRINTTTNEIFYCTFRRLDPEENHTAELVIPELPLAHPPNER

SEQ ID NO: 1894 - protein, 220 aa, Artificial Sequence
  PD-L1 ECD v143
FTVTVPKDLYVVEYGSNMAIECKFPVEKQLDLAALIVYWEMEDKDIIQFVHGEEDLKVQHSSYRQRARLLKDQLSLGNAALQITDVKLQDAGVYRCMISYGGADYKRITVKVNAPYNKINQRILVVDPVTSEHELTCQAEGYPEAEVIWTSSDHQVLSGKTTTTNSKREEKLFNVTSTLRINTTTNEIFYCTFRGLDPEENHTAELVIPELPLAHPPNER

SEQ ID NO: 1895 - protein, 220 aa, Artificial Sequence
  PD-L1 ECD v144
FTVTVPKDLYEVEYGSNMTIECKFPVEKQLDLAALIVYWEMEDKDIIQFVHGEEDLKVQHSSYRQRARLLKDQLSLGNAALQITDVKLQDAGVYRCMISYGGADYKRITVKVNAPYNKINQRILVVDPVASEHELTCQAEGYPKAEVIWTSSDHQVLSGKTTTTNSKREEKLFNVTSTLRINTTTNEIFYCTFRRLDTEENHTAELVIPELPLAHPPNER

SEQ ID NO: 1896 - protein, 220 aa, Artificial Sequence
  PD-L1 ECD v145
FTVTVPKDLYVVEYGSNMTIECKFPAEKQLDLAALIVYWEMEDKDIIQFVHGEEDLKVQHSSYRQRARLLKDQLSLGNAALQITDVKLQDAGVYRCMISYGGADYKRITVKVNAPYNKINQRILVVDPVTSEHELTCQAEGYPKAEVIWTSSDHQVLSGKTTITNSKREEKLFNVTSTLRINTTANEIFYCTFRRLDPEENHTAELVIPELPLAHPPNER

SEQ ID NO: 1897 - protein, 220 aa, Artificial Sequence
  PD-L1 ECD v146
FTVTVPKDLYVVEYGSNMTIECNFPVEKQLDLAALIVYWEMEDKDIIQFVHGEEDLKVQHSSYRQRARLLKDQLSLGNAALQITDVKLQDAGVYRCMISYGGADYKRITVKVNAPYNKINQRISVVDPVTSEHELTCQAEGYPKAEVIWTSSDHQVLSGKTTTTNSTREEKLFNVTSTLRINTTTNEIFYCTFRGLDPEENHTAELVIPELPLAHPPNER

SEQ ID NO: 1898 - protein, 220 aa, Artificial Sequence
  PD-L1 ECD v147
FTVTVPKDLYVVEYGSNMTIECNFPVEKQLDLAALIVYWEMEDKDIIQFVHGEEDLKVQHSSYRQRARLLKDRLSLGNAALQITDVKLQDAGVYRCMISYGGADYKRITVKVNAPYNKINQRILVVDPVTSEHELTCQAEGYPKAEVIWTSSDHQVLSGKTTITNSKREEKLFNVTSTLRINTTTNEIFYCTFRRLDPEENHTAELVIPELPLAHPPNER

SEQ ID NO: 1899 - protein, 220 aa, Artificial Sequence
  PD-L1 ECD v148
FTVTVPKDLYVVEYGSNMTIECKFPVEEQLDLAALIVYWEMEDKDIIQFVHGEEDLKVQHSSYRQRARLLKDQLSLGNAALQITDVKLQDAGVYRCMISYGGADYKRITVKVNAPYNKINQRILVVDPVTSEHELTCQAEGYPKAEVIRTSSDHQVLGGKTTTTNSKREEKLFNVTSTLRINTTTNEIFYCTFRRLDTEENHTAELVIPELPLAHPPNER

SEQ ID NO: 1900 - protein, 220 aa, Artificial Sequence
  PD-L1 ECD v149
FTVTVPKDLYVVEYGSNMTIECKFPVERQLDLAALIVYWEMEDKDIIQFVHGEEDLEVQHSSYRQRARLLKDQLSLGNAALQITDVKLQDAGVYRCMVSYGGADYKRITVKVNAPYNKINQRILVVDPVTSEHELTCQAEGYPKAEVIWTSSDHQVLSGKTTTTNSKREEKLFNVTSTLRINTTTNEIFYCTFRSLDPEENHTAELVIPELPLAHPPNER

SEQ ID NO: 1901 - protein, 220 aa, Artificial Sequence
  PD-L1 ECD v150
FTVTVPKDLYVVEYGSNMTIECKFPVERQLDLAALIVYWEMEDKDIIQFVHGEEDLKVQHSSYRQRARLLKDQLSLGNAALQITDVKLQDAGVYRCMISYGGADYKRITVKVNAPYNKINQRILVVDPDTSEHELTCQAEGYPKAEVIWTSSDHQVLSGKTTNTNSKREEKLFNVTSTLRINTTTNEIFYCTFRTLDPEENHTAELVIPELPLAHPPNER

SEQ ID NO: 1902 - protein, 220 aa, Artificial Sequence
  PD-L1 ECD v151
FTVTVPKDLYVVEYGSNMTIECKFPVEKQLDLAALIVYWEKEGKDIIQFVHGEEDLKVQHSSYSQRARLLKDQLSLGNAALQITDVKLQDAGVYRCMISYGGADYKRITVKVNAPYNKINQRILVVDPVTSEHELTCQAEGYPKAEVIWTSSDHQVLSGKTTTTNSKREEKLFNVTSTLRINTTTNEIFYCTFRGLDPEENHTAELVIPELPLAHPPNER

SEQ ID NO: 1903 - protein, 220 aa, Artificial Sequence
  PD-L1 ECD v152
FTVTVPKDLYVVEYGSNMTIECKFPVEKQLDLAALIVYWEKEGKDIIQFVHGEEDLKVQHSSYSQRARLLKDQLSLGNAALQITDVKLQDAGVYRCMIGYGGADYKRITVKVNAPYNKINQRILVVDPVTSEHELTCQAEGYPKAEVIWTSSDHQVLSGKTTTTNSKREEKLFNVTSTLRINTTTNEIFYCTFRRLDPEENHTAELVIPELPLAHPPNER

SEQ ID NO: 1904 - protein, 220 aa, Artificial Sequence
  PD-L1 ECD v153
FTVTVPKDLYVVEYGSNMTIECKFPVEKQLDLAALIVYWEMEDKDIIQFVHGEEDLKVQHSSYRQRALLLKDQLSLGNAALQITDVKLQDAGVYRCMISYGGADYKRITVKVNAPYNKINQRILVVDPVTSEHELTCQAEGYPKAEVIWTSSDHQVLSGKTTTTNSKREEKLLNVTSTLRINTTTNEIFYCTFRRLGSEENHTAELVIPELPLAHPPNER

SEQ ID NO: 1905 - protein, 220 aa, Artificial Sequence
  PD-L1 ECD v154
FTVTVPKDLYVVEYGSNMTIECKFPVEKQLDLAALIVYWEMEDKDIIQFAHGEEDLKVQHSSYRQRARLLKDQLSLGNAALQITDVKLQDAGVYRCMISYGGADYKRITVKVNAPYNKINQRILVVDPVTSEHELTCQAEGYPKAEVVWTSSDHQVLSGKTTTTNSKREEKLFNVTSTLRINTTTNEIFYCTFRGLDPEEDHTAELVIPELPLAHPPNER

SEQ ID NO: 1906 - protein, 220 aa, Artificial Sequence
  PD-L1 ECD v155
FTVTVPKDLYVVEYGSNMTIECKFPVEKQLDLAALIVYWEKEGEDIIQFVHGEEDLKVQHSSYRQRARLLKDQLSLGNAALQITDVKLQDAGVYRCMISYGGADYKRITVKVNAPYNKINQRILVVDPVTSEHELTCQAEGYPKAEVIWTSSDHQVLSGKTTTTNSKREEKLFNVTSTLRINTTTNEIFYCTFRGLDPEEDHTAELVIPELPLAHPPNER

SEQ ID NO: 1907 - protein, 220 aa, Artificial Sequence
  PD-L1 ECD v156
FTVTVPKDLYVVEYGSNMTIECKFPVEKQLDLAALIVYWEMEDKDIIQFAHGEEDLKVQHSSYRQRARLLKDQLSLGNAALQITDVKLQDAGVYRCMISYGGADYKRITVKVNAPYNKINQRISVVDPVTSEHELTCQAEGYPEAEVIWTSSDHQVLSGKTTTTNSKREEKLFNVTSTPRINTTTNEIFYCTFRGLDPEENHTAELVIPELPLAHPPNER

SEQ ID NO: 1908 - protein, 107 aa, Artificial Sequence
  PD-L1 IgV v67
PKDLYVVEYGSNMTIECKFPVEKQLDLAALIVYWEMEDKNIIQFVHGEEDLRVQHSSYRQRARLLKDQLSLGNAALQITDVKLQDAGVYRCMIGYGGADYKRITVKV

SEQ ID NO: 1909 - protein, 107 aa, Artificial Sequence
  PD-L1 IgV v75
PKDLYVVEYGSNMTIECKFPVEIQLDLAALIVYWEMEDKNIIQFVHGEEDLKVQHSSYRQRARLLKDQLSLGNAALQITDVKLQDAGVYRCMIGYGGADYKRITVKV

SEQ ID NO: 1910 - protein, 107 aa, Artificial Sequence
  PD-L1 IgV v80
PKDLYVVEYGSNMTIECKFPVEKQLDLAALIVYWEMEDKNIIQFVHGEEVLKVQHSSYRQRARLLKDQLSLGNAALQITDVKLQDAGVYRCLIGYGGADYKRITVKV

SEQ ID NO: 1911 - protein, 107 aa, Artificial Sequence
  PD-L1 IgV v81
PKDLYVVEYGSNMTIECKFPVGKQLDLAALTVYWEMEDKNIIQFVHGEENLKVQHSSYRQRARLLKDQLSLGNAALQITDVKLQDAGVYRCLISYGGADYKRITVEV

SEQ ID NO: 1912 - protein, 107 aa, Artificial Sequence
  PD-L1 IgV v82
PKDLYVVEYGSNMTIECKFPVEKQLDLAALIVYWEMEDKNIIQFVHGEGDLKVQHSSYRQRARLLKDQLSLGNAALQITDVKLQDAGVYRCLIGYGGADYKRITVKV

SEQ ID NO: 1913 - protein, 107 aa, Artificial Sequence
  PD-L1 IgV v87
PKDLYVVEYGSNMTIECKFPVEKQLDLAALSVYWEMEDKNIIQFVHGEEDLKVQHSSYRQRARLLKDQLSLGNAALQITDVKLQDAGVYRCLISYGGADYKRITVKV

SEQ ID NO: 1914 - protein, 107 aa, Artificial Sequence
  PD-L1 IgV v94
PKDLYVVEYGSNMTIECKFPVEKQLDLAALTVYWEMEDKNIIQFVHGEEDLKVQHSSYRQRARLLKDQLSLGNAALQITDVKLQDAGVYRCLISYGGADYKRITVEV

SEQ ID NO: 1915 - protein, 107 aa, Artificial Sequence
  PD-L1 IgV v98
PKDLYVVEYGSNMTIECKFPVEKQLDLAAPSVYWEMEDKNIIQFVHGEEDLKVQHSSYRQRARLLKDQLSLGNAALQITDVKLQDAGVYRCLISYGGADYKRITVEV

SEQ ID NO: 1916 - protein, 107 aa, Artificial Sequence
  PD-L1 IgV v100
PKDLYVVEYGSNTTIECKFPVEKQLDLAALTVYWEMEDKNIIQFVHGEENLKVQHSSYRQRARLLKDQLSLGNAALQITDVKLQDAGVYRCLISYGGADYKRITVEV

SEQ ID NO: 1917 - protein, 107 aa, Artificial Sequence
  PD-L1 IgV v102
PKDLYVVEYGSNMTIECKFPVEKQLDLAALIVYWEMEDKNIIQFVHGEEDLKVQHSSYRQRARLLKDQLSLGNAALQITDVKLQDAGVYRCLIGYGGADYKRITVKV

SEQ ID NO: 1918 - protein, 107 aa, Artificial Sequence
  PD-L1 IgV v103
PKDLYVVEYGSDMTIECKFPVEKQLDLAALIVYWEMEDKNIIQFVHGEEDLKVQHSSYRQRARLLKDQLSLGNAALQITDVKLQDAGVYRCLIGYGGADYKRITVKV

SEQ ID NO: 1919 - protein, 107 aa, Artificial Sequence
  PD-L1 IgV v110
PKDLYVVEYGSNMTIECKFPVEKQLDLAALIVYWEMEDKDIIQFVHGEEDLKVQHSSYRQRARLLKDQLSLGNAALQITDVKLQDAGVYRCMISYGGADYKRITVKV

SEQ ID NO: 1920 - protein, 107 aa, Artificial Sequence
  PD-L1 IgV v118
PKDLYVVEYGSNMTIECKFPVEKQLDLAALIVYWEMEDKDIIQFVHGEEDLKDQHSSYRQRARLLKDQLSLGNAALQITDVKLQDAGVYRCMISYGGADYKRITVKV

SEQ ID NO: 1921 - protein, 107 aa, Artificial Sequence
  PD-L1 IgV v127
PKDLYVVEYGSNMTIECKFPVEKQLDLAALIVYWEMEDKDIIQFVHGEEDLKVQHSSYRQRARLLKDQLSLGNAALQITDVKLRDAGVYRCMVSYGGADYKRITVKV

SEQ ID NO: 1922 - protein, 107 aa, Artificial Sequence
  PD-L1 IgV v152
PKDLYVVEYGSNMTIECKFPVEKQLDLAALIVYWEKEGKDIIQFVHGEEDLKVQHSSYSQRARLLKDQLSLGNAALQITDVKLQDAGVYRCMIGYGGADYKRITVKV

SEQ ID NO: 1923 - protein, 114 aa, Artificial Sequence
  PD-L1 IgV v67
FTVTVPKDLYVVEYGSNMTIECKFPVEKQLDLAALIVYWEMEDKNIIQFVHGEEDLRVQHSSYRQRARLLKDQLSLGNAALQITDVKLQDAGVYRCMIGYGGADYKRITVKVNA

SEQ ID NO: 1924 - protein, 114 aa, Artificial Sequence
  PD-L1 IgV v75
FTVTVPKDLYVVEYGSNMTIECKFPVEIQLDLAALIVYWEMEDKNIIQFVHGEEDLKVQHSSYRQRARLLKDQLSLGNAALQITDVKLQDAGVYRCMIGYGGADYKRITVKVNA

SEQ ID NO: 1925 - protein, 114 aa, Artificial Sequence
  PD-L1 IgV v80
FTVTVPKDLYVVEYGSNMTIECKFPVEKQLDLAALIVYWEMEDKNIIQFVHGEEVLKVQHSSYRQRARLLKDQLSLGNAALQITDVKLQDAGVYRCLIGYGGADYKRITVKVNA

SEQ ID NO: 1926 - protein, 114 aa, Artificial Sequence
  PD-L1 IgV v81
FTVTVPKDLYVVEYGSNMTIECKFPVGKQLDLAALTVYWEMEDKNIIQFVHGEENLKVQHSSYRQRARLLKDQLSLGNAALQITDVKLQDAGVYRCLISYGGADYKRITVEVNA

SEQ ID NO: 1927 - protein, 114 aa, Artificial Sequence
  PD-L1 IgV v82
FTVTVPKDLYVVEYGSNMTIECKFPVEKQLDLAALIVYWEMEDKNIIQFVHGEGDLKVQHSSYRQRARLLKDQLSLGNAALQITDVKLQDAGVYRCLIGYGGADYKRITVKVNA

SEQ ID NO: 1928 - protein, 114 aa, Artificial Sequence
  PD-L1 IgV v87
FTVTVPKDLYVVEYGSNMTIECKFPVEKQLDLAALSVYWEMEDKNIIQFVHGEEDLKVQHSSYRQRARLLKDQLSLGNAALQITDVKLQDAGVYRCLISYGGADYKRITVKVNA

SEQ ID NO: 1929 - protein, 114 aa, Artificial Sequence
  PD-L1 IgV v94
FTVTVPKDLYVVEYGSNMTIECKFPVEKQLDLAALTVYWEMEDKNIIQFVHGEEDLKVQHSSYRQRARLLKDQLSLGNAALQITDVKLQDAGVYRCLISYGGADYKRITVEVNA

SEQ ID NO: 1930 - protein, 114 aa, Artificial Sequence
  PD-L1 IgV v98
FTVTVPKDLYVVEYGSNMTIECKFPVEKQLDLAAPSVYWEMEDKNIIQFVHGEEDLKVQHSSYRQRARLLKDQLSLGNAALQITDVKLQDAGVYRCLISYGGADYKRITVEVNA

SEQ ID NO: 1931 - protein, 114 aa, Artificial Sequence
  PD-L1 IgV v100
FTVTVPKDLYVVEYGSNTTIECKFPVEKQLDLAALTVYWEMEDKNIIQFVHGEENLKVQHSSYRQRARLLKDQLSLGNAALQITDVKLQDAGVYRCLISYGGADYKRITVEVNA

SEQ ID NO: 1932 - protein, 114 aa, Artificial Sequence
  PD-L1 IgV v102
FTVTVPKDLYVVEYGSNMTIECKFPVEKQLDLAALIVYWEMEDKNIIQFVHGEEDLKVQHSSYRQRARLLKDQLSLGNAALQITDVKLQDAGVYRCLIGYGGADYKRITVKVNA

SEQ ID NO: 1933 - protein, 114 aa, Artificial Sequence
  PD-L1 IgV v103
FTVTVPKDLYVVEYGSDMTIECKFPVEKQLDLAALIVYWEMEDKNIIQFVHGEEDLKVQHSSYRQRARLLKDQLSLGNAALQITDVKLQDAGVYRCLIGYGGADYKRITVKVNA

SEQ ID NO: 1934 - protein, 114 aa, Artificial Sequence
  PD-L1 IgV v110
FTVTVPKDLYVVEYGSNMTIECKFPVEKQLDLAALIVYWEMEDKDIIQFVHGEEDLKVQHSSYRQRARLLKDQLSLGNAALQITDVKLQDAGVYRCMISYGGADYKRITVKVNA

SEQ ID NO: 1935 - protein, 114 aa, Artificial Sequence
  PD-L1 IgV v118
FTVTVPKDLYVVEYGSNMTIECKFPVEKQLDLAALIVYWEMEDKDIIQFVHGEEDLKDQHSSYRQRARLLKDQLSLGNAALQITDVKLQDAGVYRCMISYGGADYKRITVKVNA

SEQ ID NO: 1936 - protein, 114 aa, Artificial Sequence
  PD-L1 IgV v127
FTVTVPKDLYVVEYGSNMTIECKFPVEKQLDLAALIVYWEMEDKDIIQFVHGEEDLKVQHSSYRQRARLLKDQLSLGNAALQITDVKLRDAGVYRCMVSYGGADYKRITVKVNA

SEQ ID NO: 1937 - protein, 114 aa, Artificial Sequence
  PD-L1 IgV v152
FTVTVPKDLYVVEYGSNMTIECKFPVEKQLDLAALIVYWEKEGKDIIQFVHGEEDLKVQHSSYSQRARLLKDQLSLGNAALQITDVKLQDAGVYRCMIGYGGADYKRITVKVNA

SEQ ID NO: 1938 - protein, 231 aa, Artificial Sequence
  Fc (C5S (C220S), R77C, (R292C),  N82G (N297G), V87C (V302C), L232del (K447del))
EPKSSDKTHTCPPCPAPELLGGPSVFLFPPKPKDTLMISRTPEVTCVVVDVSHEDPEVKFNWYVDGVEVHNAKTKPCEEQYGSTYRCVSVLTVLHQDWLNGKEYKCKVSNKALPAPIEKTISKAKGQPREPQVYTLPPSREEMTKNQVSLTCLVKGFYPSDIAVEWESNGQPENNYKTTPPVLDSDGSFFLYSKLTVDKSRWQQGNVFSCSVMHEALHNHYTQKSLSLSPG

SEQ ID NO: 1939 - protein, 231 aa, Artificial Sequence
  Fc with C220S/L234A/L235E/G237A/K447del
EPKSSDKTHTCPPCPAPEAEGAPSVFLFPPKPKDTLMISRTPEVTCVVVDVSHEDPEVKFNWYVDGVEVHNAKTKPREEQYNSTYRVVSVLTVLHQDWLNGKEYKCKVSNKALPAPIEKTISKAKGQPREPQVYTLPPSREEMTKNQVSLTCLVKGFYPSDIAVEWESNGQPENNYKTTPPVLDSDGSFFLYSKLTVDKSRWQQGNVFSCSVMHEALHNHYTQKSLSLSPG

SEQ ID NO: 1940 - protein, 230 aa, Artificial Sequence
  Fc with C220S/E233P/L234V/L235A/G236del/S267K/K447del
EPKSSDKTHTCPPCPAPPVAGPSVFLFPPKPKDTLMISRTPEVTCVVVDVKHEDPEVKFNWYVDGVEVHNAKTKPREEQYNSTYRVVSVLTVLHQDWLNGKEYKCKVSNKALPAPIEKTISKAKGQPREPQVYTLPPSREEMTKNQVSLTCLVKGFYPSDIAVEWESNGQPENNYKTTPPVLDSDGSFFLYSKLTVDKSRWQQGNVFSCSVMHEALHNHYTQKSLSLSPG

SEQ ID NO: 1941 - protein, 7 aa, Artificial Sequence
  Linker
GSGGGGS

SEQ ID NO: 1942 - protein, 5 aa, Artificial Sequence
  4GS Linker
GGGGS

SEQ ID NO: 1943 - protein, 221 aa, Artificial Sequence
  PD-L1 ECD v1
FTVTVPKDLYVVEYGSNMTIECKFPVENQLDLAALIVYWEVEDKTIIQFVNGEEDLEVQHSSYRQRARLLKDQLSLGNAALQITDVKLQDAGVYRCMISYGGADYKRITVKVNAPYNKINQRILVVDPVTSEHELTCQAEGYPKAEVIWTSSDHQVLSGKTTTTNSKREEKLFNVTSTLRINTTTNEIFYCTFRRLDPEENHTAELVIPELPLAHPPNERT

SEQ ID NO: 1944 - protein, 221 aa, Artificial Sequence
  PD-L1 ECD v2
FTVTVPKDLYVVEYGSNMTLECKFPVEKQLDLAALTVYWEMEDKDITQFVHGEEDLKVQHSSYRQRARLLKDQLSLGNAALQITDVKLQDAGVYRCMISYGGADYKRITVKVNAPYNKINQRILVVDPVTSEHELTCQAEGYPKAEVIWTSSDHQVLSGKTTTTNSKREEKLFNVTSTLRINTTTNEIFYCTFRRLDPEENHTAELVIPELPLAHPPNERT

SEQ ID NO: 1945 - protein, 221 aa, Artificial Sequence
  PD-L1 ECD v3
FTVTVPKDLYVVEYGSNMTLECKFPVEKQLDLAALIVYWEKEDENIIQFVHGEEDLKVQHSSYRQRARLLKDQLSLGNAALQITDVKLQDAGVYRCMISYGGADYKRITVKVNAPYNKINQRILVVDPVTSEHELTCQAEGYPKAEVIWTSSDHQVLSGKTTTTNSKREEKLFNVTSTLRINTTTNEIFYCTFRRLDPEENHTAELVIPELPLAHPPNERT

SEQ ID NO: 1946 - protein, 221 aa, Artificial Sequence
  PD-L1 ECD v4
FTVTVSKDLYVVEYGSNMTIECKFPVEKQLDLAALIVYWEMEDKTIIQFVHGEEDLKVQHSSYRQRARLLKDQLSLGIAALQTTDVKLQDAGVYRCMISYGGADYKRITVKVNAPYNKINQRILVVDPVTSEHELTCQAEGYPKAEVIWTSSDHQVLSGKTTTTNSKREEKLFNVTSTLRINTTTNEIFYCTFRRLDPEENHTAELVIPELPLAHPPNERT

SEQ ID NO: 1947 - protein, 221 aa, Artificial Sequence
  PD-L1 ECD v5
FTVTVPKDLYVVEYGSNMTIECKFPVEKQLDLAALIVYWEMEDKNIIQFVHGEEDLKVQHSSYRQRARLLKDQLSLGIAALQITDVKLQDAGVYRCMISYGGADYKRITVKVNAPYNKINQRILVVDPVTSEHELTCQAEGYPKAEVIWTSSDHQVLSGKTTTTNSKREEKLFNVTSTLRINTTTNEIFYCTFRRLDPEENHTAELVIPELPLAHPPNERT

SEQ ID NO: 1948 - protein, 221 aa, Artificial Sequence
  PD-L1 ECD v6
FTVTVPKDLYVVEYGSNMTIECKFPVEKQLDLAALIVYWEKEDKNIIQFVHGEEDLKVQHSSYRQRARLLKDQLSLGIAALQITDVKLQDAGVYRCMISYGGADYKRITVKVNAPYNKINQRILVVDPVTSEHELTCQAEGYPKAEVIWTSSDHQVLSGKTTTTNSKREEKLFNVTSTLRINTTTNEIFYCTFRRLDPEENHTAELVIPELPLAHPPNERT

SEQ ID NO: 1949 - protein, 221 aa, Artificial Sequence
  PD-L1 ECD v7
FTVTVPKDLYVVEYGSNMTIECKFPVEKQLDLAALIVYWEMEDKTIIQFVHGEEDLKVQHSSYRQRARLLKDQLSLGIAALQITDVKLQDAGVYRCMISYGGADYKRITVKVNAPYNKINQRILVVDPVTSEHELTCQAEGYPKAEVIWTSSDHQVLSGKTTTTNSKREEKLFNVTSTLRINTTTNEIFYCTFRRLDPEENHTAELVIPELPLAHPPNERT

SEQ ID NO: 1950 - protein, 221 aa, Artificial Sequence
  PD-L1 ECD v8
FTVTVPKDLYVVEYGSNMTLECKFPVEKQLDLAALIVYWEMEDKTIIQFVHGEEDLKVQHSSYRQRARLLKDQLSLGNAALQITDVKLQDAGVYRCMISYGGADYKRITVKVNAPYNKINQRILVVDPVTSEHELTCQAEGYPKAEVIWTSSDHQVLSGKTTTTNSKREEKLFNVTSTLRINTTTNEIFYCTFRRLDPEENHTAELVIPELPLAHPPNERT

SEQ ID NO: 1951 - protein, 221 aa, Artificial Sequence
  PD-L1 ECD v9
FTVTVPKDLYVVEYGSNMTIECKFPVEKQLDLAALIVYWEMEDKTIIQFVHGEEDLKVQHSSYRQRARLLKDQLSLGNAALQITDVKLQDAGVYRCMISYGGADYKRITVKVNAPYNKINQRILVVDPVTSEHELTCQAEGYPKAEVIWTSSDHQVLSGKTTTTNSKREEKLFNVTSTLRINTTTNEIFYCTFRRLDPEENHTAELVIPELPLAHPPNERT

SEQ ID NO: 1952 - protein, 221 aa, Artificial Sequence
  PD-L1 ECD v10
FTVTVPKDLYVVEYGSNMTIECKFPVEKQLDLAALIVYWEKEDKNIIQFVHGEEDLKVQHSSYRQRARLLKDQLSLGNAALQITDVKLQDAGVYRCMISYGGADYKRITVKVNAPYNKINQRILVVDPVTSEHELTCQAEGYPKAEVIWTSSDHQVLSGKTTTTNSKREEKLFNVTSTLRINTTTNEIFYCTFRRLDPEENHTAELVIPELPLAHPPNERT

SEQ ID NO: 1953 - protein, 221 aa, Artificial Sequence
  PD-L1 ECD v11
FTVTVPKDLYVVEYGSNMTLECKFPVEKQLDLAALTVYWEMEDKDIIQFVHGEEDLKVQHSSYRQRARLLKDQLSLGNAALQITDVKLQDAGVYRCMISYGGADYKRITVKVNAPYNKINQRILVVDPVTSEHELTCQAEGYPKAEVIWTSSDHQVLSGKTTTTNSKREEKLFNVTSTLRINTTTNEIFYCTFRRLDPEENHTAELVIPELPLAHPPNERT

SEQ ID NO: 1954 - protein, 221 aa, Artificial Sequence
  PD-L1 ECD v12
FTVTVPKDLYVVEYGSDMTIECKFPVEKQLDLAALIVYWEMEDKTIIQFAHGEEDLKVQHSSYRQRARLLKGQLSLGNAALQITDVKLQDAGVYRCMISYGGADYKRITVKVNAPYNKINQRILVVDPVTSEHELTCQAEGYPKAEVIWTSSDHQVLSGKTTTTNSKREEKLFNVTSTLRINTTTNEIFYCTFRRLDPEENHTAELVIPELPLAHPPNERT

SEQ ID NO: 1955 - protein, 221 aa, Artificial Sequence
  PD-L1 ECD v13
FTVTVPKDLYVVEYGSNMTLECKFPVEKQLDLAALIVYWEMEDKNIIQSVHGEEDLKVQHSSYRQRARLLKDQLSLGNAALQITDVKLQDAGVYRCMISYGGADYKRITVKVNAPYNKINQRILVVDPVTSEHELTCQAEGYPKAEVIWTSSDHQVLSGKTTTTNSKREEKLFNVTSTLRINTTTNEIFYCTFRRLDPEENHTAELVIPELPLAHPPNERT

SEQ ID NO: 1956 - protein, 221 aa, Artificial Sequence
  PD-L1 ECD v14
FTVTVPKDLYVVEYGSNMTIECKFPVEKQLDLAALIVYWEMEDKTIIQFAHGEEDLKVQHSSYRQRARLLKDQLSLGNAALQITDVKLQDAGVYRCMISYGGADYKRITVKVNAPYNKINQRILVVDPVTSEHELTCQAEGYPKAEVIWTSSDHQVLSGKTTTTNSKREEKLFNVTSTLRINTTTNEIFYCTFRRLDPEENHTAELVIPELPLAHPPNERT

SEQ ID NO: 1957 - protein, 221 aa, Artificial Sequence
  PD-L1 ECD v15
FTVTVPKDLYVVEYGSNMTLECKFPVEKQLDLAALIVYWEMEDKTIIQFVHGEEDLKVQHSSYRQRARLLKDQLSLGIAALQITDVKLQDAGVYRCMISYGGADYKRITVKVNAPYNKINQRILVVDPVTSEHELTCQAEGYPKAEVIWTSSDHQVLSGKTTTTNSKREEKLFNVTSTLRINTTTNEIFYCTFRRLDPEENHTAELVIPELPLAHPPNERT

SEQ ID NO: 1958 - protein, 221 aa, Artificial Sequence
  PD-L1 ECD v16
FTVTVPKDLYVVEYGSNMTLECKFPVEKQLDLAALIVYWEMEDKTIIQFAHGEEDLKVQHSSYRQRARLLKDQLSLGNAALQITDVKLQDAGVYRCMISYGGADYKRITVKVNAPYNKINQRILVVDPVTSEHELTCQAEGYPKAEVIWTSSDHQVLSGKTTTTNSKREEKLFNVTSTLRINTTTNEIFYCTFRRLDPEENHTAELVIPELPLAHPPNERT

SEQ ID NO: 1959 - protein, 221 aa, Artificial Sequence
  PD-L1 ECD v17
FTVTVPKDLYVVEYGSNMTIECKFPVEKQLDLAALIVYWEVEDKTIIQFVHGEEDLKVQHSSYRQRARLLKDQLSLGNAALQITDVKLQDAGVYRCMISYGGADYKRITVKVNAPYNKINQRILVVDPVTSEHELTCQAEGYPKAEVIWTSSDHQVLSGKTTTTNSKREEKLFNVTSTLRINTTTNEIFYCTFRRLDPEENHTAELVIPELPLAHPPNERT

SEQ ID NO: 1960 - protein, 221 aa, Artificial Sequence
  PD-L1 ECD v18
FTVTVPKDLYVVEYGSNMTIECKFPVEKQLDLAALIVYWEKEDKTIIQFVHGEEDLKVQHSSYRQRARLLKDQLSLGNAALQITDVKLQDAGVYRCMISYGGADYKRITVKVNAPYNKINQRILVVDPVTSEHELTCQAEGYPKAEVIWTSSDHQVLSGKTTTTNSKREEKLFNVTSTLRINTTTNEIFYCTFRRLDPEENHTAELVIPELPLAHPPNERT

SEQ ID NO: 1961 - protein, 221 aa, Artificial Sequence
  PD-L1 ECD v19
FTVTVPKDLYVVEYGSNMTIECKFPVEKQLDLDALIVYWEMEDKNIIQFVHGEEDLKVQHSSYRQRARLLKDQLPLGNAALQITEVKLQDAGVYRCMISYGGADYKRITVKVNAPYNKINQRILVVDPVTSEHELTCQAEGYPKAEVIWTSSDHQVLSGKTTTTNSKREEKLFNVTSTLRINTTTNEIFYCTFRRLDPEENHTAELVIPELPLAHPPNERT

SEQ ID NO: 1962 - protein, 221 aa, Artificial Sequence
  PD-L1 ECD v20
FTVTVPKDLYVVEYGSNITIECKFPVEKQLDLAALIVYWEKEGKNIIQFVRGEEDLKVQHSSYRQRARLLKDQLSLGIAALQITDVKLQDAGVYRCMISYGGADYKRITVKVNAPYNKINQRILVVDPVTSEHELTCQAEGYPKAEVIWTSSDHQVLSGKTTTTNSKREEKLFNVTSTLRINTTTNEIFYCTFRRLDPEENHTAELVIPELPLAHPPNERT

SEQ ID NO: 1963 - protein, 221 aa, Artificial Sequence
  PD-L1 ECD v21
FTVTVPKDLYEVEYGSNMTLECKFPVEKQLDLAALTVYWEMEDKDIIQFVHGEEDLKVQRSSYRQRARLLKDQLPLGNAALQITDVKLQDAGVYRCMISYGGADYKRITVKVNAPYNKINQRILVVDPVTSEHELTCQAEGYPKAEVIWTSSDHQVLSGKTTTTNSKREEKLFNVTSTLRINTTTNEIFYCTFRRLDPEENHTAELVIPELPLAHPPNERT

SEQ ID NO: 1964 - protein, 221 aa, Artificial Sequence
  PD-L1 ECD v22
FTVTVPKDLYVVEYGSNMTIECKFPVEKQLDLDALIVYWEMEDKNIIQFAHGEEDLKVQHSSYRQRARLLKDQLSLGNAALQITDVKLQDAGVYRCMISYGGADYKRITVKVNAPYNKINQRILVVDPVTSEHELTCQAEGYPKAEVIWTSSDHQVLSGKTTTTNSKREEKLFNVTSTLRINTTTNEIFYCTFRRLDPEENHTAELVIPELPLAHPPNERT

SEQ ID NO: 1965 - protein, 221 aa, Artificial Sequence
  PD-L1 ECD v23
FTVTVPKDLYVVEYGGNMTIECKFPVEKQLDLDALIVYWEMEDKNIIQFVHGEEDLKVQHSSYRQRARLLEDQLPLGNAALQITDVKLQDAGVYRCMISYGGADYKRITVKVNAPYNKINQRILVVDPVTSEHELTCQAEGYPKAEVIWTSSDHQVLSGKTTTTNSKREEKLFNVTSTLRINTTTNEIFYCTFRRLDPEENHTAELVIPELPLAHPPNERT

SEQ ID NO: 1966 - protein, 221 aa, Artificial Sequence
  PD-L1 ECD v24
FTVTVPKDLYVVEYGSNMTIECKFPVGKQLDLAALIVYWEMEDKTIIQFVHGEEDLKVQHSSYRQRARLLKDQLSLGNAALQITDVKLQDAGVYRCIISYGGADYKRITVKVNAPYNKINQRILVVDPVTSEHELTCQAEGYPKAEVIWTSSDHQVLSGKTTTTNSKREEKLFNVTSTLRINTTTNEIFYCTFRRLDPEENHTAELVIPELPLAHPPNERT

SEQ ID NO: 1967 - protein, 221 aa, Artificial Sequence
  PD-L1 ECD v25
FTVTVPKDLYVVEYGSNMTIECKFPVGKQLDLAALIVYWEMEDKTIIQFVHGEEDLRVQHSSYRQRARLLKDQLSLGNAALQITDVKLQDAGVYRCMISYGGADYKRITVKVNAPYNKINQRILVVDPVTSEHELTCQAEGYPKAEVIWTSSDHQVLSGKTTTTNSKREEKLFNVTSTLRINTTTNEIFYCTFRRLDPEENHTAELVIPELPLAHPPNERT

SEQ ID NO: 1968 - protein, 221 aa, Artificial Sequence
  PD-L1 ECD v26
FTVTVPKDLYVVEYGSNMTIECKFPVEKQLDLDALIVYWEMEDKNIIQFVHGVEDLKVQHSSYRQRARLLKDQLSLGNAALQITDVKLQDAGVYRCMISYGGADYKRITVKVNAPYNKINQRILVVDPVTSEHELTCQAEGYPKAEVIWTSSDHQVLSGKTTTTNSKREEKLFNVTSTLRINTTTNEIFYCTFRRLDPEENHTAELVIPELPLAHPPNERT

SEQ ID NO: 1969 - protein, 221 aa, Artificial Sequence
  PD-L1 ECD v27
FTVTVPKDLYVVEYGSNMTIECKFPVEKQLDLAALIVYWEMEGKDIIQFVHGEEDLKAQHSSYRQRARLLKDQLSLGNAALQITDVKLQDAGVYRCMISYGGADYKRITVKVNAPYNKINQRILVVDPVTSEHELTCQAEGYPKAEVIWTSSDHQVLSGKTTTTNSKREEKLFNVTSTLRINTTTNEIFYCTFRRLDPEENHTAELVIPELPLAHPPNERT

SEQ ID NO: 1970 - protein, 221 aa, Artificial Sequence
  PD-L1 ECD v28
FTVTVPKDLYVVEYGSNMTIECKFPVEKQLDLAALIVYWGMEVKTIIQFAHGEEDLKVQHSSYRQRARLLKDQLSLGNAALQITDVKLQDAGVYRCMISYGGADYKRITVKVNAPYNKINQRILVVDPVTSEHELTCQAEGYPKAEVIWTSSDHQVLSGKTTTTNSKREEKLFNVTSTLRINTTTNEIFYCTFRRLDPEENHTAELVIPELPLAHPPNERT

SEQ ID NO: 1971 - protein, 221 aa, Artificial Sequence
  PD-L1 ECD v29
FTVTVPKDLYVVESGSNMTIECKFPVEEQLDLAALIVYWEMEDKTIIQFVHGEEDLKVQHSSYRQRARLLKDQLSLGNAALQITDVKLQDAGVYRCMISYGGADYKRITVKVNAPYNKINQRILVVDPVTSEHELTCQAEGYPKAEVIWTSSDHQVLSGKTTTTNSKREEKLFNVTSTLRINTTTNEIFYCTFRRLDPEENHTAELVIPELPLAHPPNERT

SEQ ID NO: 1972 - protein, 221 aa, Artificial Sequence
  PD-L1 ECD v30
FTVTVPKDLYVVEYGSNMTIECKFPVEKQLDLDALIVYWEMEDKNIIQFVHGEEDLKVQHSSYRQRARLLKDQLSLGSAALQITDVKLQDAGVYRCMISYGGADYKRITVKVNAPYNKINQRILVVDPVTSEHELTCQAEGYPKAEVIWTSSDHQVLSGKTTTTNSKREEKLFNVTSTLRINTTTNEIFYCTFRRLDPEENHTAELVIPELPLAHPPNERT

SEQ ID NO: 1973 - protein, 221 aa, Artificial Sequence
  PD-L1 ECD v31
FTVTVPKDLYVVEYGSNMTIECKFPVEKQLDLDALIVYWEMEDKNIIQFVHGEEDLKVQHSSYRQRARLLKDQLSLGIAALQITDVKLQDAGVYRCMISYGGADYKRITVKVNAPYNKINQRILVVDPVTSEHELTCQAEGYPKAEVIWTSSDHQVLSGKTTTTNSKREEKLFNVTSTLRINTTTNEIFYCTFRRLDPEENHTAELVIPELPLAHPPNERT

SEQ ID NO: 1974 - protein, 221 aa, Artificial Sequence
  PD-L1 ECD v32
FTVTVPKDLYVVEYGSNMTIECKFPVEKQLDLDALIVYWEMEDKTIIQFVHGEEDLKVQHSSYRQRARLLKDQLSLGNAALQITDVKLQDAGVYRCMISYGGADYKRITVKVNAPYNKINQRILVVDPVTSEHELTCQAEGYPKAEVIWTSSDHQVLSGKTTTTNSKREEKLFNVTSTLRINTTTNEIFYCTFRRLDPEENHTAELVIPELPLAHPPNERT

SEQ ID NO: 1975 - protein, 221 aa, Artificial Sequence
  PD-L1 ECD v33
FTVTVPKDLYVVEYGSNMTIECKFPVEKQLDLDALIVYWEMEDKTIIQFVHGEEDLKVQHSSYRQRARLLKDQLSLGIAALQITDVKLQDAGVYRCMISYGGADYKRITVKVNAPYNKINQRILVVDPVTSEHELTCQAEGYPKAEVIWTSSDHQVLSGKTTTTNSKREEKLFNVTSTLRINTTTNEIFYCTFRRLDPEENHTAELVIPELPLAHPPNERT

SEQ ID NO: 1976 - protein, 221 aa, Artificial Sequence
  PD-L1 ECD v34
FTVTVPKDLYVVEYGSNMTIECKFPVGKQLDLAALIVYWEMEDKTIIQFAHGEEDLKVQHSSYRQRARLLKDQLSLGNAALQITDVKLQDAGVYRCMISYGGADYKRITVKVNAPYNKINQRILVVDPVTSEHELTCQAEGYPKAEVIWTSSDHQVLSGKTTTTNSKREEKLFNVTSTLRINTTTNEIFYCTFRRLDPEENHTAELVIPELPLAHPPNERT

SEQ ID NO: 1977 - protein, 221 aa, Artificial Sequence
  PD-L1 ECD v35
FTVTVPKDLYVVEYGSNMTIECKFPVEKQLDLAALIVYWEMEDKTIIQFAHGEEDLKVQHSSYRQRARLLKDQLSLGSAALQITDVKLQDAGVYRCMISYGGADYKRITVKVNAPYNKINQRILVVDPVTSEHELTCQAEGYPKAEVIWTSSDHQVLSGKTTTTNSKREEKLFNVTSTLRINTTTNEIFYCTFRRLDPEENHTAELVIPELPLAHPPNERT

SEQ ID NO: 1978 - protein, 221 aa, Artificial Sequence
  PD-L1 ECD v36
FTVTVPKDLYVVEYGSNMTLECKFPVEKQLDLAALIVYWEMEDKTIIQFVHGEEDLKVQHSSYRQRARLLKDQLSLGNAALQITDVKLQDAGVYRCMISYGGADYKRITMKVNAPYNKINQRILVVDPVTSEHELTCQAEGYPKAEVIWTSSDHQVLSGKTTTTNSKREEKLFNVTSTLRINTTTNEIFYCTFRRLDPEENHTAELVIPELPLAHPPNERT

SEQ ID NO: 1979 - protein, 221 aa, Artificial Sequence
  PD-L1 ECD v37
FTVTVPKDLYVVEYGSNMTLECKFPVEKQLDLAALTVYWEMEDKTIIQFAHGEEDLKVQHSSYRQRARLLKDQLSLGNAALQITDVKLQDAGVYRCMISYGGADYKRITVKVNAPYNKINQRILVVDPVTSEHELTCQAEGYPKAEVIWTSSDHQVLSGKTTTTNSKREEKLFNVTSTLRINTTTNEIFYCTFRRLDPEENHTAELVIPELPLAHPPNERT

SEQ ID NO: 1980 - protein, 221 aa, Artificial Sequence
  PD-L1 ECD v38
FTVTVPKDLYVVEYGSNMTIECKFPVEKQLDLAALIVYWEMEDKTIIQFVHGEEDLKVQHSSYRQRARLLKDQPPLGNAALQITDVKLQDAGVYRCMISYGGADYKRITVKVNAPYNKINQRILVVDPVTSEHELTCQAEGYPKAEVIWTSSDHQVLSGKTTTTNSKREEKLFNVTSTLRINTTTNEIFYCTFRRLDPEENHTAELVIPELPLAHPPNERT

SEQ ID NO: 1981 - protein, 221 aa, Artificial Sequence
  PD-L1 ECD v39
FTVTVPKDLYVVEYGSNMTIECKFPVEKQLDLAALIVYWEMEDKTIIQFVHGEEDLKVQHSSYRQRARLLKDQLPLGNAALQITDVKLQDAGVYRCMISYGGADYKRITVKVNAPYNKINQRILVVDPVTSEHELTCQAEGYPKAEVIWTSSDHQVLSGKTTTTNSKREEKLFNVTSTLRINTTTNEIFYCTFRRLDPEENHTAELVIPELPLAHPPNERT

SEQ ID NO: 1982 - protein, 221 aa, Artificial Sequence
  PD-L1 ECD v40
FTVTVPKDLYVVEYGSNMTIECKFPVEKQLDLAALIVYWEMEDKNIIQFVHGEEDLKVQHSSYRQRARLLKDQLPLGNAALQITDVKLQDAGVYRCMISYGGADYRRITVKVNAPYNKINQRILVVDPVTSEHELTCQAEGYPKAEVIWTSSDHQVLSGKTTTTNSKREEKLFNVTSTLRINTTTNEIFYCTFRRLDPEENHTAELVIPELPLAHPPNERT

SEQ ID NO: 1983 - protein, 221 aa, Artificial Sequence
  PD-L1 ECD v41
FTVTVPKDLYVVEYGSNMTIECKFPVEKQLDLAALIVYWEMEDKNIIQFVHGEEDLKVQHSSYRQRARLLKDQLPLGNAALQITDVKLQDAGVYRCMISYGGADYKRITVKVNAPYNKINQRILVVDPVTSEHELTCQAEGYPKAEVIWTSSDHQVLSGKTTTTNSKREEKLFNVTSTLRINTTTNEIFYCTFRRLDPEENHTAELVIPELPLAHPPNERT

SEQ ID NO: 1984 - protein, 221 aa, Artificial Sequence
  PD-L1 ECD v42
FTVTVPKDLYVVEYGSNMTIECKFPVEKQLDLDALIVYWEMEDKNIIQFVHGEEDLKVQHSSYRQRARLLKDQLPLGNAALQITDVKLQDAGVYRCVISYGGADYKRITVKVNAPYNKINQRILVVDPVTSEHELTCQAEGYPKAEVIWTSSDHQVLSGKTTTTNSKREEKLFNVTSTLRINTTTNEIFYCTFRRLDPEENHTAELVIPELPLAHPPNERT

SEQ ID NO: 1985 - protein, 221 aa, Artificial Sequence
  PD-L1 ECD v43
FTVTVPKDLYVVEYGSNMTIECKFPVEKQLDLDALIVYWEMEDKNIIQFVHGEEDLKVQHSSYRQRARLLKDQLPLGNAALQITDVKLQDAGVYRCMISYGGAGYKRITVKVNAPYNKINQRILVVDPVTSEHELTCQAEGYPKAEVIWTSSDHQVLSGKTTTTNSKREEKLFNVTSTLRINTTTNEIFYCTFRRLDPEENHTAELVIPELPLAHPPNERT

SEQ ID NO: 1986 - protein, 221 aa, Artificial Sequence
  PD-L1 ECD v44
FTVTVPKDLYVVEYGSNMTIECKFPVEKQLDLDALIVYWEMEDKNIIQFVHGEEDLKVQHSSYRQRARLLKDQLPLGNAALQITDVKLQDAGVYRCMISYGGADYKRITVKVNAPYNKINQRILVVDPVTSEHELTCQAEGYPKAEVIWTSSDHQVLSGKTTTTNSKREEKLFNVTSTLRINTTTNEIFYCTFRRLDPEENHTAELVIPELPLAHPPNERT

SEQ ID NO: 1987 - protein, 221 aa, Artificial Sequence
  PD-L1 ECD v45
FTVTVPKDLYVVEYGSNMTLECKFPVGKQLDLAALIVYWEMEDKTIIQFAHGEEDLKVQHSSYRQRARLLKDQLSLGNAALQITDVKLQDAGVYRCMISYGGADYKRITVKVNAPYNKINQRILVVDPVTSEHELTCQAEGYPKAEVIWTSSDHQVLSGKTTTTNSKREEKLFNVTSTLRINTTTNEIFYCTFRRLDPEENHTAELVIPELPLAHPPNERT

SEQ ID NO: 1988 - protein, 221 aa, Artificial Sequence
  PD-L1 ECD v46
FTVTVPKDLYVVEYGSNMTLECKFPVGKQLDLAALIVYWEMEGKDIIQFVHGEEDLKAQHSSYRQRARLLKDQLSLGIAALQITDVKLQDAGVYRCMISYGGADYKRITVKVNAPYNKINQRILVVDPVTSEHELTCQAEGYPKAEVIWTSSDHQVLSGKTTTTNSKREEKLFNVTSTLRINTTTNEIFYCTFRRLDPEENHTAELVIPELPLAHPPNERT

SEQ ID NO: 1989 - protein, 221 aa, Artificial Sequence
  PD-L1 ECD v47
FTVTVPKDLYVVEYGSNMTLECKFPVEKQLDLAALIVYWEMEGKDIIQFVHGEEDLKAQHSSYRQRARLLKDQLSLGIAALQITDVKLQDAGVYRCMISYGGADYKRITVKVNAPYNKINQRILVVDPVTSEHELTCQAEGYPKAEVIWTSSDHQVLSGKTTTTNSKREEKLFNVTSTLRINTTTNEIFYCTFRRLDPEENHTAELVIPELPLAHPPNERT

SEQ ID NO: 1990 - protein, 221 aa, Artificial Sequence
  PD-L1 ECD v48
FTVTVPKDLYVVEYGSNMTLECKFPVEKQLDLDALIVYWEMEGKDIIQFVHGEEDLKAQHSSYRQRARLLKDQLSLGIAALQITDVKLQDAGVYRCMISYGGADYKRITVKVNAPYNKINQRILVVDPVTSEHELTCQAEGYPKAEVIWTSSDHQVLSGKTTTTNSKREEKLFNVTSTLRINTTTNEIFYCTFRRLDPEENHTAELVIPELPLAHPPNERT

SEQ ID NO: 1991 - protein, 221 aa, Artificial Sequence
  PD-L1 ECD v49
FTVTVPKDLYVVEYGSNMTLECKFPVEKQLDLAALIVYWEMEGKDIIQFVHGEEDLKVQHSSYRQRARLLKDQLSLGIAALQITDVKLQDAGVYRCMISYGGADYKRITVKVNAPYNKINQRILVVDPVTSEHELTCQAEGYPKAEVIWTSSDHQVLSGKTTTTNSKREEKLFNVTSTLRINTTTNEIFYCTFRRLDPEENHTAELVIPELPLAHPPNERT

SEQ ID NO: 1992 - protein, 221 aa, Artificial Sequence
  PD-L1 ECD v50
FTVTVPKDLYVVEYGSNMTIECKFPVGKQLDLAALIVYWEMEDKTIIQFAHGEEDLKVQHSSYRQRARLLKDQLSLGIAALQITDVKLQDAGVYRCMISYGGADYKRITVKVNAPYNKINQRILVVDPVTSEHELTCQAEGYPKAEVIWTSSDHQVLSGKTTTTNSKREEKLFNVTSTLRINTTTNEIFYCTFRRLDPEENHTAELVIPELPLAHPPNERT

SEQ ID NO: 1993 - protein, 221 aa, Artificial Sequence
  PD-L1 ECD v51
FTVTVPKDLYVVEYGSNMTIECKFPVEKQLDLAALIVYWEMEDKTIIQFAHGEEDLKVQHSSYRQRARLLKDQLSLGIAALQITDVKLQDAGVYRCMISYGGADYKRITVKVNAPYNKINQRILVVDPVTSEHELTCQAEGYPKAEVIWTSSDHQVLSGKTTTTNSKREEKLFNVTSTLRINTTTNEIFYCTFRRLDPEENHTAELVIPELPLAHPPNERT

SEQ ID NO: 1994 - protein, 221 aa, Artificial Sequence
  PD-L1 ECD v52
FTVTVPKDLYAVEYGSNMTLECKFPVGKQLDLAALIVYWEMEGKDIIQFVYGEEDLKVQHSSYRQRARLLKDQLSLGNAALQITDVKLQDAGVYRCMIGYGGADYKRITVKVNAPYNKINQRILVVDPVTSEHELTCQAEGYPKAEVIWTSSDHQVLSGKTTTTNSKREEKLFNVTSTLRINTTTNEIFYCTFRRLDPEENHTAELVIPELPLAHPPNERT

SEQ ID NO: 1995 - protein, 221 aa, Artificial Sequence
  PD-L1 ECD v53
FTVTVPKDLYVVEYGSNMTLECKFPVGKQLDLAALIVYWEMEGKTIIQFAHGEEDLKVQHSSYRQRARLLKDQLSLGNAALQITDVKLQDAGVYRCMISYGGADYKRITVKVNAPYNKINQRILVVDPVTSEHELTCQAEGYPKAEVIWTSSDHQVLSGKTTTTNSKREEKLFNVTSTLRINTTTNEIFYCTFRRLDPEENHTAELVIPELPLAHPPNERT

SEQ ID NO: 1996 - protein, 221 aa, Artificial Sequence
  PD-L1 ECD v54
FTVTVPKDLYVVEYGSNMTLECKFPVEEQLDLAALIVYWEMEGKDIIQFVHGEEDLKAQHSSYRQRARLLKDQLSLGNAALQITDVKLRDAGVYRCMISYGGADYKRITVKVNAPYNKINQRILVVDPVTSEHELTCQAEGYPKAEVIWTSSDHQVLSGKTTTTNSKREEKLFNVTSTLRINTTTNEIFYCTFRRLDPEENHTAELVIPELPLAHPPNERT

SEQ ID NO: 1997 - protein, 221 aa, Artificial Sequence; identical to SEQ ID NO: 1953
  PD-L1 ECD v55

SEQ ID NO: 1998 - protein, 221 aa, Artificial Sequence
  PD-L1 ECD v56
FTVTVPKDLYVVEYGSNMTLECKFPVEEQLDLAALIVYWEMEGKDIIQFVHGGEDLKAQHSSYRQRARLLKDQLSLGIAALQITDVKLQDAGVYRCMISYGGADYKRITVKVNAPYNKINQRILVVDPVTSEHELTCQAEGYPKAEVIWTSSDHQVLSGKTTTTNSKREEKLFNVTSTLRINTTTNEIFYCTFRRLDPEENHTAELVIPELPLAHPPNERT

SEQ ID NO: 1999 - protein, 221 aa, Artificial Sequence
  PD-L1 ECD v57
FTVTVPKDLYVVEYGSNMTIECKFPVEKQLDLDALIVYWEMEGKDIIQFVHGEEDLKAQHSSYRQRARLLKDQLPLGNAALQITDVKLQDAGVYRCMISYGGADYKRITVKVNAPYNKINQRILVVDPVTSEHELTCQAEGYPKAEVIWTSSDHQVLSGKTTTTNSKREEKLFNVTSTLRINTTTNEIFYCTFRRLDPEENHTAELVIPELPLAHPPNERT

SEQ ID NO: 2000 - protein, 221 aa, Artificial Sequence
  PD-L1 ECD v58
FTVTVPKDLYVVEYGSNMTIECRFPVEKQLDLAALIVYWEMEGKDIIQFVHGEEDLKVQHSSYRQRARLLKDQLSLGNAALQITDVKLQDAGVYRCMISYGGADYKRITVKVNAPYNKINQRILVVDPVTSEHELTCQAEGYPKAEVIWTSSDHQVLSGKTTTTNSKREEKLFNVTSTLRINTTTNEIFYCTFRRLDPEENHTAELVIPELPLAHPPNERT

SEQ ID NO: 2001 - protein, 221 aa, Artificial Sequence
  PD-L1 ECD v59
FTVTVPKDLYVVEYGSNMTLECKFPVEKQLDLAALIVYWEMEGKDIIQFVHGEEDLKAQHSSYRQRARLLKDQLSLGIAALQITDVKLQGAGVYRCMISYDGADYKRITVKVNAPYNKINQRILVVDPVTSEHELTCQAEGYPKAEVIWTSSDHQVLSGKTTTTNSKREEKLFNVTSTLRINTTTNEIFYCTFRRLDPEENHTAELVIPELPLAHPPNERT

SEQ ID NO: 2002 - protein, 222 aa, Artificial Sequence
  PD-L1 ECD v60
FTVTVPKDLYVVEYGSNMTIECKFPVEKQLDLAALIVYWEMEGKDIIQFVHGEEDQKAQHSSYRQRARLLKDQLSLGNAALQITDVKLQDAGVYRCMISYGGGADYKRITVKVNAPYNKINQRILVVDPVTSEHELTCQAEGYPKAEVIWTSSDHQVLSGKTTTTNSKREEKLFNVTSTLRINTTTNEIFYCTFRRLDPEENHTAELVIPELPLAHPPNERT

SEQ ID NO: 2003 - protein, 221 aa, Artificial Sequence
  PD-L1 ECD v61
FTVTVPKDLYVVEYGSNMTLECEFPVEKQLDLAALIVYWEMEGKDIIQFVHGEEDLKAQHSSYRQRARLLKDQLSLGIAALQITDVKLQDAGVYRCMISYGGADYKRITVKVNAPYNKINQRILVVDPVTSEHELTCQAEGYPKAEVIWTSSDHQVLSGKTTTTNSKREEKLFNVTSTLRINTTTNEIFYCTFRRLDPEENHTAELVIPELPLAHPPNERT

SEQ ID NO: 2004 - protein, 221 aa, Artificial Sequence
  PD-L1 ECD v62
FTVTVPKDLYVVEYGSNMTLECEFPVEKQLDLAALIVYWEMEGKDIIQFAHGEEDLKVQHSSYRQRARLLKDQLSLGIAALQITDVKLQDAGVYRCMISYGGADYKRITVKVNAPYNKINQRILVVDPVTSEHELTCQAEGYPKAEVIWTSSDHQVLSGKTTTTNSKREEKLFNVTSTLRINTTTNEIFYCTFRRLDPEENHTAELVIPELPLAHPPNERT

SEQ ID NO: 2005 - protein, 221 aa, Artificial Sequence
  PD-L1 ECD v63
FTVTVPKDLYVVEYGSNMIIECKFPVGKQLDLAALIVYWEMEDKIIIQFAHGEEDLKVQHSSYRQRARLLKDQLSLGIAALQITDVKLQDAGVYRCKISYGGADYKRITVKVNAPYNKINQRILVVDPVTSEHELTCQAEGYPKAEVIWTSSDHQVLSGKTTTTNSKREEKLFNVTSTLRINTTTNEIFYCTFRRLDPEENHTAELVIPELPLAHPPNERT

SEQ ID NO: 2006 - protein, 221 aa, Artificial Sequence
  PD-L1 ECD v64
FTVTVPKDLYVVEYGSNMTLECKFPVEKQLDLAALIVYWEKEGKDIIQFVHGEEDLKVQHSSYRQRARLLKDQLSLGNAALQITDVKLQDAGVYRCMISYGGADYKRITVKVNAPYNKINQRILVVDPVTSEHELTCQAEGYPKAEVIWTSSDHQVLSGKTTTTNSKREEKLFNVTSTLRINTTTNEIFYCTFRRLDPEENHTAELVIPELPLAHPPNERT

SEQ ID NO: 2007 - protein, 221 aa, Artificial Sequence
  PD-L1 ECD v65
FTVTVPKDLYVVEYGSNMTIECRFPVEKQLDLAALIVYWEMEDKTIIQFVHGEEDLKVQHSSYRQRARLLKDQLSLGIAALQITDVKLQDAGVYRCMISYGGADYKRITVKVNAPYNKINQRILVVDPVTSEHELTCQAEGYPKAEVIWTSSDHQVLSGKTTTTNSKREEKLFNVTSTLRINTTTNEIFYCTFRRLDPEENHTAELVIPELPLAHPPNERT

SEQ ID NO: 2008 - protein, 222 aa, Artificial Sequence
  PD-L1 ECD v66
FTVTVPKDLYVVEYGSNMTLECKFPVEEQLDLAALIVYWEMEGKDIIQFVHGEEDLKAQHSSYRQRARLLKDQLSLGNAALQITDVKLRDAGVYRCMISYGGGADYKRITVKVNAPYNKINQRILVVDPVTSEHELTCQAEGYPKAEVIWTSSDHQVLSGKTTTTNSKREEKLFNVTSTLRINTTTNEIFYCTFRRLDPEENHTAELVIPELPLAHPPNERT

SEQ ID NO: 2009 - protein, 19 aa, Artificial Sequence
  Signal Peptide
MGSTAILALLLAVLQGVSA

SEQ ID NO: 2010 - protein, 8 aa, Artificial Sequence
  Flag tag
DYKDDDDK

SEQ ID NO: 2011 - protein, 6 aa, Artificial Sequence
  His tag
HHHHHH

SEQ ID NO: 2012 - protein, 133 aa, Artificial Sequence
  Wildtype PD-L1 SIP
MGSTAILALLLAVLQGVSAFTVTVPKDLYVVEYGSNMTIECKFPVEKQLDLAALIVYWEMEDKNIIQFVHGEEDLKVQHSSYRQRARLLKDQLSLGNAALQITDVKLQDAGVYRCMISYGGADYKRITVKVNA

SEQ ID NO: 2013 - protein, 134 aa, Artificial Sequence
  PD-L1 v60 SIP
MGSTAILALLLAVLQGVSAFTVTVPKDLYVVEYGSNMTIECKFPVEKQLDLAALIVYWEMEGKDIIQFVHGEEDQKAQHSSYRQRARLLKDQLSLGNAALQITDVKLQDAGVYRCMISYGGGADYKRITVKVNA

SEQ ID NO: 2014 - protein, 68 aa, Artificial Sequence
  CD8 hinge and transmembrane domain
KPTTTPAPRPPTPAPTIASQPLSLRPEACRPAAGGAVHTRGLDFACDIYIWAPLAGTCGVLLLSLVIT

SEQ ID NO: 2015 - protein, 431 aa, Artificial Sequence
  antiCD19 chimeric antigen receptor CAR-2
DIQMTQTTSSLSASLGDRVTISCRASQDISKYLNWYQQKPDGTVKLLIYHTSRLHSGVPSRFSGSGSGTDYSLTISNLEQEDIATYFCQQGNTLPYTFGGGTKLEITGSTSGSGKPGSGEGSTKGEVKLQESGPGLVAPSQSLSVTCTVSGVSLPDYGVSWIRQPPRKGLEWLGVIWGSETTYYNSALKSRLTIIKDNSKSQVFLKMNSLQTDDTAIYYCAKHYYYGGSYAMDYWGQGTSVTVSSASAKPTTTPAPRPPTPAPTIASQPLSLRPEASRPAAGGAVHTRGLDFASDIYIWAPLAGTCGVLLLSLVITLYCRVKFSRSADAPAYQQGQNQLYNELNLGRREEYDVLDKRRGRDPEMGGKPRRKNPQEGLYNELQKDKMAEAYSEIGMKGERRRGKGHDGLYQGLSTATKDTYDALHMQALPPR

SEQ ID NO: 2016 - protein, 707 aa, Artificial Sequence
  antiCD19 chimeric antigen receptor CAR-2
MALPVTALLLPLALLLHAARPDIQMTQTTSSLSASLGDRVTISCRASQDISKYLNWYQQKPDGTVKLLIYHTSRLHSGVPSRFSGSGSGTDYSLTISNLEQEDIATYFCQQGNTLPYTFGGGTKLEITGSTSGSGKPGSGEGSTKGEVKLQESGPGLVAPSQSLSVTCTVSGVSLPDYGVSWIRQPPRKGLEWLGVIWGSETTYYNSALKSRLTIIKDNSKSQVFLKMNSLQTDDTAIYYCAKHYYYGGSYAMDYWGQGTSVTVSSASAKPTTTPAPRPPTPAPTIASQPLSLRPEASRPAAGGAVHTRGLDFASDIYIWAPLAGTCGVLLLSLVITLYCRVKFSRSADAPAYQQGQNQLYNELNLGRREEYDVLDKRRGRDPEMGGKPRRKNPQEGLYNELQKDKMAEAYSEIGMKGERRRGKGHDGLYQGLSTATKDTYDALHMQALPPRGSGEGRGSLLTCGDVEENPGPSRSELIKENMHMKLYMEGTVDNHHFKCTSEGEGKPYEGTQTMRIKVVEGGPLPFAFDILATSFLYGSKTFINHTQGIPDFFKQSFPEGFTWERVTTYEDGGVLTATQDTSLQDGCLIYNVKIRGVNFTSNGPVMQKKTLGWEAFTETLYPADGGLEGRNDMALKLVGGSHLIANIKTTYRSKKPAKNLKMPGVYYVDYRLERIKEANNETYVEQHEVAVARYCDLPSKLGHKLN

SEQ ID NO: 2017 - DNA, 8708 bp, Artificial Sequence
  anti-CD19 chimeric antigen receptor CAR-2
agcttaatgtagtcttatgcaatactcttgtagtcttgcaacatggtaacgatgagttagcaacatgccttacaaggagagaaaaagcaccgtgcatgccgattggtggaagtaaggtggtacgatcgtgccttattaggaaggcaacagacgggtctgacatggattggacgaaccactgaattgccgcattgcagagatattgtatttaagtgcctagctcgatacaataaacgggtctctctggttagaccagatctgagcctgggagctctctggctaactagggaacccactgcttaagcctcaataaagcttgccttgagtgcttcaagtagtgtgtgcccgtctgttgtgtgactctggtaactagagatccctcagacccttttagtcagtgtggaaaatctctagcagtggcgcccgaacagggacttgaaagcgaaagggaaaccagaggagctctctcgacgcaggactcggcttgctgaagcgcgcacggcaagaggcgaggggcggcgactggtgagtacgccaaaaattttgactagcggaggctagaaggagagagatgggtgcgagagcgtcagtattaagcgggggagaattagatcgcgatgggaaaaaattcggttaaggccagggggaaagaaaaaatataaattaaaacatatagtatgggcaagcagggagctagaacgattcgcagttaatcctggcctgttagaaacatcagaaggctgtagacaaatactgggacagctacaaccatcccttcagacaggatcagaagaacttagatcattatataatacagtagcaaccctctattgtgtgcatcaaaggatagagataaaagacaccaaggaagctttagacaagatagaggaagagcaaaacaaaagtaagaccaccgcacagcaagcggccgctgatcttcagacctggaggaggagatatgagggacaattggagaagtgaattatataaatataaagtagtaaaaattgaaccattaggagtagcacccaccaaggcaaagagaagagtggtgcagagagaaaaaagagcagtgggaataggagctttgttccttgggttcttgggagcagcaggaagcactatgggcgcagcctcaatgacgctgacggtacaggccagacaattattgtctggtatagtgcagcagcagaacaatttgctgagggctattgaggcgcaacagcatctgttgcaactcacagtctggggcatcaagcagctccaggcaagaatcctggctgtggaaagatacctaaaggatcaacagctcctggggatttggggttgctctggaaaactcatttgcaccactgctgtgccttggaatgctagttggagtaataaatctctggaacagatttggaatcacacgacctggatggagtgggacagagaaattaacaattacacaagcttaatacactccttaattgaagaatcgcaaaaccagcaagaaaagaatgaacaagaattattggaattagataaatgggcaagtttgtggaattggtttaacataacaaattggctgtggtatataaaattattcataatgatagtaggaggcttggtaggtttaagaatagtttttgctgtactttctatagtgaatagagttaggcagggatattcaccattatcgtttcagacccacctcccaaccccgaggggacccgacaggcccgaaggaatagaagaagaaggtggagagagagacagagacagatccattcgattagtgaacggatctcgacggtatcggttaacttttaaaagaaaaggggggattggggggtacagtgcaggggaaagaatagtagacataatagcaacagacatacaaactaaagaattacaaaaacaaattacaaaaattcaaaattttatcgatcacgagactagcctcgagaagcttgatatcgaattcccacggggttggacgcgtaggaacagagaaacaggagaatatgggccaaacaggatatctgtggtaagcagttcctgccccggctcagggccaagaacagttggaacagcagaatatgggccaaacaggatatctgtggtaagcagttcctgccccggctcagggccaagaacagatggtccccagatgcggtcccgccctcagcagtttctagagaaccatcagatgtttccagggtgccccaaggacctgaaatgaccctgtgccttatttgaactaaccaatcagttcgcttctcgcttctgttcgcgcgcttctgctccccgagctctatataagcagagctcgtttagtgaaccgtcagatcgcctggagacgccatccacgctgttttgacttccatagaaggatcccctgcaggtaatacgactcactatagggtccactgccgccaccatggctctgcctgtgacagctctgctgctgcctctggccctgctgctccatgccgccagacccggatccgatatccagatgacccagaccaccagcagcctgagcgccagcctgggcgatagagtgaccatcagctgcagagccagccaggacatcagcaagtacctgaactggtatcagcagaaacccgacggcaccgtgaagctgctgatctaccacaccagcagactgcacagcggcgtgcccagcagattttctggcagcggctccggcaccgactacagcctgaccatctccaacctggaacaggaagatatcgctacctacttctgtcagcaaggcaacaccctgccctacaccttcggcggaggcaccaagctggaaatcaccggcagcacaagcggcagcggcaagcctggatctggcgagggaagcaccaagggcgaagtgaaactgcaggaaagcggccctggactggtggccccaagccagtctctgagcgtgacctgtaccgtgtccggcgtgtccctgcctgactatggcgtgtcctggatcagacagccacccagaaagggcctggaatggctgggagtgatctggggcagcgagacaacctactacaacagcgccctgaagtcccggctgaccatcatcaaggacaactccaagagccaggtgttcctgaagatgaacagcctgcagaccgacgacaccgccatctactactgcgccaagcactactactacggcggcagctacgccatggactactggggccagggcacaagcgtgaccgtgtccagcgctagcgccaagcccaccacgacgccagcgccgcgaccaccaacaccggcgcccaccatcgcgtcgcagcccctgtccctgcgcccagaggcgagccggccagcggcggggggcgcagtgcacacgagggggctggacttcgccagtgatatctacatctgggcgcccctggccgggacttgtggggtccttctcctgtcactggttatcaccctttactgcagagtgaagttcagcaggagcgcagacgcccccgcgtaccagcagggccagaaccagctctataacgagctcaatctaggacgaagagaggagtacgatgttttggacaagagacgtggccgggaccctgagatggggggaaagccgagaaggaagaaccctcaggaaggcctgtacaatgaactgcagaaagataagatggcggaggcctacagtgagattgggatgaaaggcgagcgccggaggggcaaggggcacgatggcctttaccagggtctcagtacagccaccaaggacacctacgacgcccttcacatgcaggccctgccccctcgcggcagtggcgagggcagaggaagtctgctaacatgcggtgacgtggaggagaatccgggcccctctagaagcgagctgattaaggagaacatgcacatgaagctgtacatggagggcaccgtggacaaccatcacttcaagtgcacatccgagggcgaaggcaagccctacgagggcacccagaccatgagaatcaaggtggtcgagggcggccctctccccttcgccttcgacatcctggctactagcttcctctacggcagcaagaccttcatcaaccacacccagggcatccccgacttcttcaagcagtccttccctgagggcttcacatgggagagagtcaccacatacgaagacgggggcgtgctgaccgctacccaggacaccagcctccaggacggctgcctcatctacaacgtcaagatcagaggggtgaacttcacatccaacggccctgtgatgcagaagaaaacactcggctgggaggccttcaccgagacgctgtaccccgctgacggcggcctggaaggcagaaacgacatggccctgaagctcgtgggcgggagccatctgatcgcaaacatcaagaccacatatagatccaagaaacccgctaagaacctcaagatgcctggcgtctactatgtggactacagactggaaagaatcaaggaggccaacaacgagacctacgtcgagcagcacgaggtggcagtggccagatactgcgacctccctagcaaactggggcacaagcttaattgagtcgacaatcaacctctggattacaaaatttgtgaaagattgactggtattcttaactatgttgctccttttacgctatgtggatacgctgctttaatgcctttgtatcatgctattgcttcccgtatggctttcattttctcctccttgtataaatcctggttgctgtctctttatgaggagttgtggcccgttgtcaggcaacgtggcgtggtgtgcactgtgtttgctgacgcaacccccactggttggggcattgccaccacctgtcagctcctttccgggactttcgctttccccctccctattgccacggcggaactcatcgccgcctgccttgcccgctgctggacaggggctcggctgttgggcactgacaattccgtggtgttgtcggggaagctgacgtcctttccatggctgctcgcctgtgttgccacctggattctgcgcgggacgtccttctgctacgtcccttcggccctcaatccagcggaccttccttcccgcggcctgctgccggctctgcggcctcttccgcgtcttcgccttcgccctcagacgagtcggatctccctttgggccgcctccccgcctggaattcgagctcggtacctttaagaccaatgacttacaaggcagctgtagatcttagccactttttaaaagaaaaggggggactggaagggctaattcactcccaacgaagacaagatctgctttttgcttgtactgggtctctctggttagaccagatctgagcctgggagctctctggctaactagggaacccactgcttaagcctcaataaagcttgccttgagtgcttcaagtagtgtgtgcccgtctgttgtgtgactctggtaactagagatccctcagacccttttagtcagtgtggaaaatctctagcagtagtagttcatgtcatcttattattcagtatttataacttgcaaagaaatgaatatcagagagtgagaggaacttgtttattgcagcttataatggttacaaataaagcaatagcatcacaaatttcacaaataaagcatttttttcactgcattctagttgtggtttgtccaaactcatcaatgtatcttatcatgtctggctctagctatcccgcccctaactccgcccagttccgcccattctccgccccatggctgactaattttttttatttatgcagaggccgaggccgcctcggcctctgagctattccagaagtagtgaggaggcttttttggaggcctaggcttttgcgtcgagacgtacccaattcgccctatagtgagtcgtattacgcgcgctcactggccgtcgttttacaacgtcgtgactgggaaaaccctggcgttacccaacttaatcgccttgcagcacatccccctttcgccagctggcgtaatagcgaagaggcccgcaccgatcgcccttcccaacagttgcgcagcctgaatggcgaatggcgcgacgcgccctgtagcggcgcattaagcgcggcgggtgtggtggttacgcgcagcgtgaccgctacacttgccagcgccctagcgcccgctcctttcgctttcttcccttcctttctcgccacgttcgccggctttccccgtcaagctctaaatcgggggctccctttagggttccgatttagtgctttacggcacctcgaccccaaaaaacttgattagggtgatggttcacgtagtgggccatcgccctgatagacggtttttcgccctttgacgttggagtccacgttctttaatagtggactcttgttccaaactggaacaacactcaaccctatctcggtctattcttttgatttataagggattttgccgatttcggcctattggttaaaaaatgagctgatttaacaaaaatttaacgcgaattttaacaaaatattaacgtttacaatttcccaggtggcacttttcggggaaatgtgcgcggaacccctatttgtttatttttctaaatacattcaaatatgtatccgctcatgagacaataaccctgataaatgcttcaataatattgaaaaaggaagagtatgagtattcaacatttccgtgtcgcccttattcccttttttgcggcattttgccttcctgtttttgctcacccagaaacgctggtgaaagtaaaagatgctgaagatcagttgggtgcacgagtgggttacatcgaactggatctcaacagcggtaagatccttgagagttttcgccccgaagaacgttttccaatgatgagcacttttaaagttctgctatgtggcgcggtattatcccgtattgacgccgggcaagagcaactcggtcgccgcatacactattctcagaatgacttggttgagtactcaccagtcacagaaaagcatcttacggatggcatgacagtaagagaattatgcagtgctgccataaccatgagtgataacactgcggccaacttacttctgacaacgatcggaggaccgaaggagctaaccgcttttttgcacaacatgggggatcatgtaactcgccttgatcgttgggaaccggagctgaatgaagccataccaaacgacgagcgtgacaccacgatgcctgtagcaatggcaacaacgttgcgcaaactattaactggcgaactacttactctagcttcccggcaacaattaatagactggatggaggcggataaagttgcaggaccacttctgcgctcggcccttccggctggctggtttattgctgataaatctggagccggtgagcgtgggtctcgcggtatcattgcagcactggggccagatggtaagccctcccgtatcgtagttatctacacgacggggagtcaggcaactatggatgaacgaaatagacagatcgctgagataggtgcctcactgattaagcattggtaactgtcagaccaagtttactcatatatactttagattgatttaaaacttcatttttaatttaaaaggatctaggtgaagatcctttttgataatctcatgaccaaaatcccttaacgtgagttttcgttccactgagcgtcagaccccgtagaaaagatcaaaggatcttcttgagatcctttttttctgcgcgtaatctgctgcttgcaaacaaaaaaaccaccgctaccagcggtggtttgtttgccggatcaagagctaccaactctttttccgaaggtaactggcttcagcagagcgcagataccaaatactgtccttctagtgtagccgtagttaggccaccacttcaagaactctgtagcaccgcctacatacctcgctctgctaatcctgttaccagtggctgctgccagtggcgataagtcgtgtcttaccgggttggactcaagacgatagttaccggataaggcgcagcggtcgggctgaacggggggttcgtgcacacagcccagcttggagcgaacgacctacaccgaactgagatacctacagcgtgagctatgagaaagcgccacgcttcccgaagggagaaaggcggacaggtatccggtaagcggcagggtcggaacaggagagcgcacgagggagcttccagggggaaacgcctggtatctttatagtcctgtcgggtttcgccacctctgacttgagcgtcgatttttgtgatgctcgtcaggggggcggagcctatggaaaaacgccagcaacgcggcctttttacggttcctggccttttgctggccttttgctcacatgttctttcctgcgttatcccctgattctgtggataaccgtattaccgcctttgagtgagctgataccgctcgccgcagccgaacgaccgagcgcagcgagtcagtgagcgaggaagcggaagagcgcccaatacgcaaaccgcctctccccgcgcgttggccgattcattaatgcagctggcacgacaggtttcccgactggaaagcgggcagtgagcgcaacgcaattaatgtgagttagctcactcattaggcaccccaggctttacactttatgcttccggctcgtatgttgtgtggaattgtgagcggataacaatttcacacaggaaacagctatgaccatgattacgccaagcgcgcaattaaccctcactaaagggaacaaaagctggagctgca

SEQ ID NO: 2018 - protein, 428 aa, Artificial Sequence
  antiCD19 chimeric antigen receptor CAR-1
DIQMTQTTSSLSASLGDRVTISCRASQDISKYLNWYQQKPDGTVKLLIYHTSRLHSGVPSRFSGSGSGTDYSLTISNLEQEDIATYFCQQGNTLPYTFGGGTKLEITGSTSGSGKPGSGEGSTKGEVKLQESGPGLVAPSQSLSVTCTVSGVSLPDYGVSWIRQPPRKGLEWLGVIWGSETTYYNSALKSRLTIIKDNSKSQVFLKMNSLQTDDTAIYYCAKHYYYGGSYAMDYWGQGTSVTVSSASAKPTTTPAPRPPTPAPTIASQPLSLRPEACRPAAGGAVHTRGLDFACDIYIWAPLAGTCGVLLLSLVITRVKFSRSADAPAYQQGQNQLYNELNLGRREEYDVLDKRRGRDPEMGGKPRRKNPQEGLYNELQKDKMAEAYSEIGMKGERRRGKGHDGLYQGLSTATKDTYDALHMQALPPR

SEQ ID NO: 2019 - protein, 706 aa, Artificial Sequence
  antiCD19 chimeric antigen receptor CAR-1
MALPVTALLLPLALLLHAARPGSDIQMTQTTSSLSASLGDRVTISCRASQDISKYLNWYQQKPDGTVKLLIYHTSRLHSGVPSRFSGSGSGTDYSLTISNLEQEDIATYFCQQGNTLPYTFGGGTKLEITGSTSGSGKPGSGEGSTKGEVKLQESGPGLVAPSQSLSVTCTVSGVSLPDYGVSWIRQPPRKGLEWLGVIWGSETTYYNSALKSRLTIIKDNSKSQVFLKMNSLQTDDTAIYYCAKHYYYGGSYAMDYWGQGTSVTVSSASAKPTTTPAPRPPTPAPTIASQPLSLRPEACRPAAGGAVHTRGLDFACDIYIWAPLAGTCGVLLLSLVITRVKFSRSADAPAYQQGQNQLYNELNLGRREEYDVLDKRRGRDPEMGGKPRRKNPQEGLYNELQKDKMAEAYSEIGMKGERRRGKGHDGLYQGLSTATKDTYDALHMQALPPRGGRSGEGRGSLLTCGDVEENPGPSRSELIKENMHMKLYMEGTVDNHHFKCTSEGEGKPYEGTQTMRIKVVEGGPLPFAFDILATSFLYGSKTFINHTQGIPDFFKQSFPEGFTWERVTTYEDGGVLTATQDTSLQDGCLIYNVKIRGVNFTSNGPVMQKKTLWEAFTETLYPADGGLEGRNDMALKLVGGSHLIANIKTTYRSKKPAKNLKMPGVYYVDYRLERIKEANNETYVEQHEVAARYCDLPSKLGHKLN

SEQ ID NO: 2020 - protein, 232 aa, Artificial Sequence
  Blue fluorescent protein
SRSELIKENMHMKLYMEGTVDNHHFKCTSEGEGKPYEGTQTMRIKVVEGGPLPFAFDILATSFLYGSKTFINHTQGIPDFFKQSFPEGFTWERVTTYEDGGVLTATQDTSLQDGCLIYNVKIRGVNFTSNGPVMQKKTLWEAFTETLYPADGGLEGRNDMALKLVGGSHLIANIKTTYRSKKPAKNLKMPGVYYVDYRLERIKEANNETYVEQHEVAARYCDLPSKLGHKLN

SEQ ID NO: 2021 - protein, 18 aa, Artificial Sequence
  T2A
EGRGSLLTCGDVEENPGP

SEQ ID NO: 2022 - protein, 5 aa, Artificial Sequence
  EAAAK Linker
EAAAK

SEQ ID NO: 2023 - protein, 15 aa, Artificial Sequence
  3x EAAAK Linker
EAAAKEAAAKEAAAK

SEQ ID NO: 2024 - protein, 25 aa, Artificial Sequence
  5x EAAAK Linker
EAAAKEAAAKEAAAKEAAAKEAAAK

SEQ ID NO: 2025 - protein, 400 aa, Artificial Sequence
  PAS
ASPAAPAPASPAAPAPSAPAASPAAPAPASPAAPAPSAPAASPAAPAPASPAAPAPSAPAASPAAPAPASPAAPAPSAPAASPAAPAPASPAAPAPSAPAASPAAPAPASPAAPAPSAPAASPAAPAPASPAAPAPSAPAASPAAPAPASPAAPAPSAPAASPAAPAPASPAAPAPSAPAASPAAPAPASPAAPAPSAPAASPAAPAPASPAAPAPSAPAASPAAPAPASPAAPAPSAPAASPAAPAPASPAAPAPSAPAASPAAPAPASPAAPAPSAPAASPAAPAPASPAAPAPSAPAASPAAPAPASPAAPAPSAPAASPAAPAPASPAAPAPSAPAASPAAPAPASPAAPAPSAPAASPAAPAPASPAAPAPSAPAASPAAPAPASPAAPAPSAPA

SEQ ID NO: 2026 - protein, 22 aa, Artificial Sequence
  P2A
GSGATNFSLLKQAGDVEENPGP

SEQ ID NO: 2027 - protein, 237 aa, Artificial Sequence
  eGFP
SKGEELFTGVVPILVELDGDVNGHKFSVSGEGEGDATYGKLTLKFICTTGKLPVPWPTLVTTLTYGVQCFSRYPDHMKQHDFFKSAMPEGYVQERTIFFKDDGNYKTRAEVKFEGDTLVNRIELKGIDFKEDGNILGHKLEYNYNSHNVYIMADKQKNGIKVNFKIRHNIEDGSVQLADHYQQNTPIGDGPVLLPDNHYLSTQSALSKDPNEKRDHMVLLEFVTAAGITHGMDELYK

SEQ ID NO: 2028 - protein, 237 aa, Artificial Sequence
  Green fluorescent protein
SKGEELFTGVVPILVELDGDVNGHKFSVSGEGEGDATYGKLTLKFICTTGKLPVPWPTLVTTFSYGVQCFSRYPDHMKQHDFFKSAMPEGYVQERTIFFKDDGNYKTRAEVKFEGDTLVNRIELKGIDFKEDGNILGHKLEYNYNSHNVYIMADKQKNGIKVNFKIRHNIEDGSVQLADHYQQNTPIGDGPVLLPDNHYLSTQSALSKDPNEKRDHMVLLEFVTAAGITHGMDELYK

SEQ ID NO: 2029 - protein, 239 aa, Artificial Sequence
  eGFP
MVSKGEELFTGVVPILVELDGDVNGHKFSVSGEGEGDATYGKLTLKFICTTGKLPVPWPTLVTTLTYGVQCFSRYPDHMKQHDFFKSAMPEGYVQERTIFFKDDGNYKTRAEVKFEGDTLVNRIELKGIDFKEDGNILGHKLEYNYNSHNVYIMADKQKNGIKVNFKIRHNIEDGSVQLADHYQQNTPIGDGPVLLPDNHYLSTQSALSKDPNEKRDHMVLLEFVTAAGITLGMDELYK

SEQ ID NO: 2030 - protein, 107 aa, Artificial Sequence
  CD80 WT IgV
VIHVTKEVKEVATLSCGHNVSVEELAQTRIYWQKEKKMVLTMMSGDMNIWPEYKNRTIFDITNNLSIVILALRPSDEGTYECVVLKYEKDAFKREHLAEVTLSVKAD

SEQ ID NO: 2031 - protein, 17 aa, Artificial Sequence
  GS(G4S)3 linker
GSGGGGSGGGGSGGGGS

SEQ ID NO: 2032 - protein, 27 aa, Artificial Sequence
  GS(G4S)5 linker
GSGGGGSGGGGSGGGGSGGGGSGGGGS

1. A variant PD-L1 polypeptide, comprising an IgV domain or a specific binding fragment thereof, an IgC domain or a specific binding fragment thereof, or both, wherein the variant PD-L1 polypeptide comprises one or more amino acid modifications at one or more positions in an unmodified PD-L1 or a specific binding fragment thereof corresponding to position(s) selected from 45, 43, 6, 10, 11, 14, 15, 16, 17, 18, 19, 20, 22, 23, 26, 27, 28, 33, 35, 36, 40, 41, 44, 46, 47, 49, 50, 51, 52, 53, 54, 55, 56, 57, 58, 60, 64, 65, 68, 71, 72, 73, 74, 75, 78, 79, 83, 85, 89, 90, 93, 97, 98, 99, 101, 102, 103, 104, 106, 110, 111, 112, 113, 117, 119, 120, 121, 124, 129, 130, 131, 134, 137, 138, 144, 148, 149, 150, 155, 158, 160, 163, 165, 167, 170, 171, 173, 175, 176, 177, 179, 180, 183, 185, 188, 189, 192, 193, 194, 195, 196, 197, 198, 199, 200, 201, 202, 203, 204, 206, 207, 213, or 221, with reference to the numbering of SEQ ID NO:30.

2. The variant PD-L1 polypeptide of claim 1, wherein the unmodified PD-L1 comprises (i) the sequence of amino acids set forth in SEQ ID NO:30, (ii) a sequence of amino acids that has at least 95% sequence identity to SEQ ID NO:30; or (iii) a portion of the sequence of (i) or (ii) comprising an IgV domain or IgC domain or specific binding fragments thereof or both.

3. The variant PD-L1 polypeptide of claim 1, wherein the variant PD-L1 comprises up to 1, 2, 3, 4, 5, 6, 7, 8, 9, 10, 11, 12, 13, 14, 15, 16, 17, 18, 19 or 20 amino acid modifications, optionally amino acid substitutions, insertions and/or deletions.

4. The variant PD-L1 polypeptide of claim 1, wherein the variant PD-L1 polypeptide comprises a sequence of amino acids that exhibits at least 85% sequence identity to SEQ ID NO:30 or 1728 or a specific binding fragment thereof.

5. The variant PD-L1 polypeptide of claim 1, wherein the one or more amino acid modifications are selected from P6S, Y10F, V11A, V11E, Y14S, G15A, S16G, N17D, M18I, M18T, M18V, T19A, T19I, I20L, C22R, K23E, K23N, K23R, E26A, E27D, E27G, K28E, K28I, K28R, K28N, A33D, L35P, I36S, I36T, E40G, M41K, M41V, D43G, D43V, K44E, N45D, N45I, N45T, I47T, I46V, F49S, V50A, H51N, H51R, H51Y, G52R, G52V, E53G, E53V, E54G, D55G, D55N, D55S, D55V, L56Q, K57E, K57R, V58A, V58D, H60R, R64S, Q65L, R68L, K71E, D72G, Q73R, L74P, S75P, N78I, N78S, A79T, I83T, D85E, Q89R, D90G, V93E, M97I, M97K, M97L, I98L, I98T, I98V, S99G, G101D, G101G-ins (G101GG), G102D, A103V, D104G, K106E, K106R, V110M, K111E, K111T, V112A, N113Y, N117S, I119T, N120S, Q121L, L124S, V129A, V129D, T130A, S131F, E134G, C137R, Q138R, K144E, K144Q, I148V, W149R, T150A, Q155H, S158G, K160M, T163I, K163N, N165Y, K167R, K167T, E170G, K171R, F173I, F173L, K173Y, V175A, T176N, S177C, L179P, R180S, T183A, T183I, T185A, I188V, F189L, F189S, T192S, F193S, R194G, R194W, R195G, R195S, R195T, L196S, D197G, P198S, P198T, E199G, E200K, E200N, N201D, N201Y, H202Q, T203A, A204T, L206F, V207A, L213P, T221L or a conservative amino acid substitution thereof.

6. The variant PD-L1 polypeptide of claim 1, wherein the one or more amino acid modifications are selected from among K28N/M41V/N45T/H51N/K57E I20L/I36T/N45D/I47T, I20L/M41K/K44E, P6S/N45T/N78I/I83T, N78I, M41K/N78I, N45T/N78I, I20L/N45T, N45T, M41K, I20L/I36T/N45D, N17D/N47T/V50A/D72G, I20L/F49S, N45T/V50A, I20L/N45T/N78I, I20L/N45T/V50A, M41V/N45T, M41K/N45T, A33D/S75P/D85E, M18I/M41K/D43G/H51R/N78I, V11E/I20L/I36T/N45D/H60R/S75P, A33D/V50A, S16G/A33D/K71E/S75P, E27G/N45T/M97I, E27G/N45T/K57R, A33D/E53V, D43G/N45D/V58A, E40G/D43V/N45T/V50A, Y14S/K28E/N45T, A33D/N78S, A33D/N78I, A33D/N45T, A33D/N45T/N78I, E27G/N45T/V50A, N45T/V50A/N78S, I20L/N45T/V110M, I20L/I36T/N45T/V50A, N45T/L74P/S75P, N45T/S75P, S75P/K106R, S75P, A33D/S75P, A33D/S75P/D104G, A33D/S75P, I20L/E27G/N45T/V50A, I20L/E27G/D43G/N45D/V58A/N78I, I20L/D43G/N45D/V58A/N78I, I20L/A33D/D43G/N45D/V58A/N78I, I20L/D43G/N45D/N78I, E27G/N45T/V50A/N78I, N45T/V50A/N78I, V11A/I20L/E27G/D43G/N45D/H51Y/S99G, I20L/E27G/D43G/N45T/V50A, I20L/K28E/D43G/N45D/V58A/Q89R, I20L/I36T/N45D, I20L/K28E/D43G/N45D/E53G/V58A/N78I, A33D/D43G/N45D/V58A/S75P, K23R/D43G/N45D, I20L/D43G/N45D/V58A/N78I/D90G/G101D, D43G/N45D/L56Q/V58A/G101G-ins (G101GG), I20L/K23E/D43G/N45D/V58A/N78I, I20L/K23E/D43G/N45D/V50A/N78I, T19I/E27G/N45I/V50A/N78I/M97K, I20L/M41K/D43G/N45D, K23R/N45T/N78I, I20L/K28E/D43G/N45D/V58A/Q89R/G101G-ins (G101GG), K57R/S99G, K57R/S99G/F189L, M18V/M97L/F193S/R195G/E200K/H202Q, I36S/M41K/M97L/K144Q/R195G/E200K/H202Q/L206F, C22R/Q65L/L124S/K144Q/R195G/E200N/H202Q/T221L, M18V/I98L/L124S/P198T/L206F, S99G/N117S/I148V/K171R/R180S, I36T/M97L/A103V/Q155H, K28I/S99G, R195S, A79T/S99G/T185A/R195G/E200K/H202Q/L206F, K57R/S99G/L124S/K144Q, K57R/S99G/R195G, D55V/M97L/S99G, E27G/I36T/D55N/M97L/K111E, E54G/M97L/S99G, G15A/I36T/M97L/K111E/H202Q, G15A/I36T/V129D, G15A/I36T/V129D/R195G, G15A/V129D, I36S/M97L, I36T/D55N/M97L/K111E/A204T, I36T/D55N/M97L/K111E/V129A/F173L, I36T/D55S/M97L/K111E/I148V/R180S, I36T/G52R/M97L/V112A/K144E/V175A/P198T, I36T/I46V/D55G/M97L/K106E/K144E/T185A/R195G, I36T/I83T/M97L/K144E/P198T, I36T/M97L/K111E, I36T/M97L/K144E/P198T, I36T/M97L/Q155H/F193S/N201Y, I36T/M97L/V129D, L35P/I36S/M97L/K111E, M18I/I36T/E53G/M97L/K144E/E199G/V207A, M18T/I36T/D55N/M97L/K111E, M18V/M97L/T176N/R195G, M97L/S99G, N17D/M97L/S99G, S99G/T185A/R195G/P198T, V129D/H202Q, V129D/P198T, V129D/T150A, V93E/V129D, Y10F/M18V/S99G/Q138R/T203A, N45D, K160M/R195G, N45D/K144E, N45D/P198S, N45D/P198T, N45D/R195G, N45D/R195S, N45D/S131F, N45D/V58D, V129D/R195S, I98T/F173Y/L196S, N45D/E134G/L213P, N45D/F173I/S177C, N45D/I148V/R195G, N45D/K111T/R195G, N45D/N113Y/R195S, N45D/N165Y/E170G, N45D/Q89R/I98V, N45D/S131F/P198S, N45D/S75P/P198S, N45D/V50A/R195T, E27D/N45D/T183A/I188V, F173Y/T183I/L196S/T203A, K23N/N45D/S75P/N120S, N45D/G102D/R194W/R195G, N45D/G52V/Q121L/P198S, N45D/I148V/R195G/N201D, N45D/K111T/T183A/I188V, N45D/Q89R/F189S/P198S, N45D/S99G/C137R/V207A, N45D/T163I/K167R/R195G, N45D/T183A/T192S/R194G, N45D/V50A/I119T/K144E, T19A/N45D/K144E/R195G, V11E/N45D/T130A/P198T, V26A/N45D/T163I/T185A, K23N/N45D/L124S/K167T/R195G, K23N/N45D/Q73R/T163I, K28E/N45D/W149R/S158G/P198T, K28R/N45D/K57E/I98V/R195S, K28R/N45D/V129D/T163N/R195T, M41K/D43G/N45D/R64S/R195G, M41K/D43G/N45D/R64S/S99G, N45D/R68L/F173L/D197G/P198S, N45D/V50A/I148V/R195G/N201D, M41K/D43G/K44E/N45D/R195G/N201D, N45D/V50A/L124S/K144E/L179P/R195G, I20L/I36T, I20L/D43G, I20L/N45D, I20L/V50A, I20L/V58A, I20L/S75P, I20L/N78I, I36T/D43G, I36T/N45D, I36T/N45T, I36T/V50A, I36T/V58A, I36T/S75P, I36T/N78I, D43G/N45D, D43G/N45T, D43G/V50A, D43G/V58A, D43G/S75P, D43G/N78I, N45D/V50A, N45D/V58A, N45D/S75P, N45D/N78I, N45T/V50A, N45T/V58A, N45T/S75P, N45T/N78I, V50A/V58A, V50A/S75P, V50A/N78I, V58A/S75P, V58A/N78I, or S75P/N78I.

7-12. (canceled)

13. The variant PD-L1 polypeptide of claim 1, comprising the sequence of amino acids set forth in any of SEQ ID NOS: 56-120, 1725, 1729-1818, 1819-1907, 1943-2008 or a specific binding fragment thereof, or a sequence of amino acids that exhibits at least 95% sequence identity to any of SEQ ID NOS: 56-120, 1725, 1729-1818, 1819-1907, 1943-2008 or a specific binding fragment thereof and that contains the one or more of the amino acid modifications thereof; or
the sequence of amino acids set forth in any of SEQ ID NOs: 121-185, 244-308, 1726-1727, 1908-1937 or a specific binding fragment thereof, or a sequence of amino acids that exhibits at least 95% sequence identity to any of SEQ ID NOs: 121-185, 244-308, 1726-1727, 1908-1937 or a specific binding fragment thereof and that contains the one or more of the amino acid modifications thereof.

14-16. (canceled)

17. The variant PD-L1 polypeptide of claim 1, wherein the variant PD-L1 polypeptide specifically binds to the ectodomain of PD-1 with increased affinity compared to the binding of the unmodified PD-L1 to the ectodomain of PD-1.

18-24. (canceled)

25. The variant PD-L1 polypeptide of claim 1, wherein:
the variant PD-L1 polypeptide is a soluble protein;
the variant PD-L1 polypeptide lacks the PD-L1 transmembrane domain and intracellular signaling domain; and/or
the variant PD-L1 polypeptide is not capable of being expressed on the surface of a cell.

26. (canceled)

27. An immunomodulatory protein comprising the variant PD-L1 polypeptide of claim 1 linked to a multimerization domain.

28. The immunomodulatory protein of claim 27, wherein the multimerization domain is an Fc domain or a variant thereof with reduced effector function.

29. The variant PD-L1 polypeptide of claim 1, that is a transmembrane immunomodulatory protein further comprising a transmembrane domain.

30. The variant PD-L1 polypeptide of claim 29, further comprising a cytoplasmic signaling domain.

31-32. (canceled)

33. The immunomodulatory protein of claim 27, wherein the immunomodulatory protein is a dimer.

34. (canceled)

35. An immunomodulatory protein, comprising the variant PD-L1 polypeptide of claim 1 linked, directly or indirectly via a linker, to a second polypeptide comprising an immunoglobulin superfamily (IgSF) domain of an IgSF family member.

36. The immunomodulatory protein of claim 35, wherein the IgSF domain is an affinity-modified IgSF domain, said affinity-modified IgSF domain comprising one or more amino acid modifications compared to the unmodified or wild-type IgSF domain of the IgSF family member.

37. The immunomodulatory protein of claim 36, wherein the IgSF domain is affinity modified and exhibits increased binding to one or more of its cognate binding partner(s) compared to the binding of the unmodified or wild-type IgSF domain of the IgSF family member to the same one or more cognate binding partner(s).

38-44. (canceled)

45. The immunomodulatory protein of claim 35 that is a dimer.

46. The immunomodulatory protein of claim 45 that is a homodimer.

47-55. (canceled)

56. A conjugate, comprising the variant PD-L1 polypeptide of claim 1 linked to a moiety.

57. The conjugate of claim 56, wherein the moiety is a targeting moiety that specifically binds to a molecule on the surface of a cell.

58. The conjugate of claim 57, wherein the cell is an immune cell or a tumor cell.

59. The conjugate of claim 56, wherein the moiety is a protein, a peptide, nucleic acid, small molecule, antibody, antigen-binding fragment, or nanoparticle.

60-61. (canceled)

62. A nucleic acid molecule, encoding the variant PD-L1 polypeptide of claim 1, an immunomodulatory protein comprising the variant PD-L1 polypeptide of claim 1, or a conjugate that is a fusion protein comprising the variant PD-L1 polypeptide of claim 1.

63-64. (canceled)

65. A cell, comprising a nucleic acid of claim 62.

66. A method of producing a variant PD-L1 polypeptide, comprising introducing the nucleic acid molecule of claim 62 or a vector comprising the nucleic acid molecule of claim 62 into a host cell under conditions to express the protein in the cell.

67-68. (canceled)

69. An engineered cell, expressing the variant PD-L1 polypeptide of claim 1.

70-71. (canceled)

72. The engineered cell of claim 69, wherein the cell is an immune cell.

73. The engineered cell of claim 69, wherein the engineered cell further comprises a chimeric antigen receptor (CAR) or an engineered T-cell receptor.

74. An infectious agent, comprising a nucleic acid molecule encoding the variant PD-L1 polypeptide of claim 1.

75. The engineered cell of claim 72, wherein the immune cell is an antigen presenting cell (APC) or a lymphocyte.

76. (canceled)

77. A pharmaceutical composition, comprising the variant PD-L1 polypeptide of claim 1, or an immunomodulatory protein, a conjugate, an engineered cell or an infectious agent each comprising a variant PD-L1 polypeptide of claim 1.

78-81. (canceled)

82. A method of modulating an immune response in a subject, comprising administering the pharmaceutical composition of claim 77 to the subject.

83. A method of modulating an immune response in a subject, comprising administering the engineered cells of claim 69 to the subject.

84-100. (canceled)
